(19) United States
(12) Patent Application Publication
(10) Pub. No.: US 2002/0044941 A1
(43) Pub. Date: Apr. 18, 2002

(54) Nucleic acids, proteins and antibodies

(76) Inventors: Craig A. Rosen, Laytonsville, MD (US); Steven M. Ruben, Olney, MD (US)

Correspondence Address: HUMAN GENOME SCIENCES INC, 9410 KEY WEST AVENUE, ROCKVILLE, MD, 20850

(21) Appl. No.: 09/925,302

(22) Filed: Aug. 10, 2001

Related U.S. Application Data
(63) Continuation-in-part of application No. PCT/US00/05918, filed on Mar. 8, 2000.
(60) Provisional application No. 60/124,270, filed on Mar. 12, 1999.

(51) Int. Cl. A61K 39/00; A61K 48/00; C12Q 1/68; G01N 33/53; C07H 21/04; C12N 9/00; C12P 21/02; C12N 5/06

(52) U.S. Cl. 424/184.1; 435/69.1; 435/325; 435/320.1; 435/6; 435/7.1; 435/183; 514/44; 536/23.1

(57) ABSTRACT

The present invention relates to novel lung cancer related polynucleotides, the polypeptides encoded by these polynucleotides herein collectively referred to as “lung cancer antigens,” and antibodies that immunospecifically bind these polypeptides, and the use of such lung cancer polynucleotides, antigens, and antibodies for detecting, treating, preventing and/or prognosing disorders of the lung, including, but not limited to, the presence of lung cancer and lung cancer metastases. More specifically, isolated lung cancer nucleic acid molecules are provided encoding novel lung cancer polypeptides. Novel lung cancer polypeptides and antibodies that bind to these polypeptides are provided. Also provided are vectors, host cells, and recombinant and synthetic methods for producing human lung cancer polynucleotides, polypeptides, and/or antibodies. The invention further relates to diagnostic and therapeutic methods useful for diagnosing, treating, preventing and/or prognosing disorders related to the lung, including lung cancer, and therapeutic methods for treating such disorders. The invention further relates to screening methods for identifying agonists and antagonists of polynucleotides and polypeptides of the invention. The invention further relates to methods and/or compositions for inhibiting or promoting the production and/or function of the polypeptides of the invention.

[0001] This application is a claims benefit of priority under 35 U.S.C. § 365(c) and § 120 to International Application Number PCT/US00/05918, filed Mar. 8, 2000 which was published by the International Bureau in the English language as International Publication Number WO00/55180 on Sep. 21, 2000 and under 35 U.S.C. § 119(e) to U.S. application Ser. No. 60/124,270 filed Mar. 12, 1999, both of which are hereby incorporated by reference herein.

[0002] Statement under 37 CF. R. 1. 77(b)(4)

[0003] This application refers to a “Sequence Listing” listed below, which is provided as an electronic document on two identical compact discs (CD-R), labeled “Copy 1” and “Copy 2.” These compact discs each contain the following files, which are hereby incorporated in their entirety herein:

| Document | File Name | Size in bytes | Date of Creation |
|---|---|---|---|
| Sequence Listing | PA104SEQLIST.txt | 1,777,901 | 8/8/01 |

### FIELD OF THE INVENTION

[0004] The present invention relates to novel lung cancer related polynucleotides, the polypeptides encoded by these polynucleotides herein collectively referred to as “lung cancer antigens,” and antibodies that immunospecifically bind these polypeptides, and the use of such lung cancer polynucleotides, antigens, and antibodies for detecting, treating, preventing and/or prognosing disorders of the lung, including, but not limited to, the presence of lung cancer and lung cancer metastases. More specifically, isolated lung cancer nucleic acid molecules are provided encoding novel lung cancer polypeptides. Novel lung cancer polypeptides and antibodies that bind to these polypeptides are provided. Also provided are vectors, host cells, and recombinant and synthetic methods for producing human lung cancer polynucleotides, polypeptides, and/or antibodies. The invention further relates to diagnostic and therapeutic methods useful for diagnosing, treating, preventing and/or prognosing disorders related to the lung, including lung cancer, and therapeutic methods for treating such disorders. The invention further relates to screening methods for identifying agonists and antagonists of polynucleotides and polypeptides of the invention. The invention further relates to methods and/or compositions for inhibiting or promoting the production and/or function of the polypeptides of the invention.

### BACKGROUND OF THE INVENTION

[0005] Lung cancer is the most common cancer-related cause of death in the world. Lung cancer arises due to the uncontrolled growth of abnormal cells in the lung. Many different factors may be involved in the development of lung cancer such as exposure to carcinogens (e.g., tobacco smoke, asbestos, and radon). Lung cancer can often take many years to develop; however, changes in the lung can begin almost immediately upon exposure to carcinogens.

[0006] Tobacco smoke is recognized as the number one cause of lung cancer in both males and females. Approximately 85% of all persons diagnosed with lung cancer are current or former smokers. People over fifty with a long history of cigarette smoking have the highest risk of developing lung cancer. Many of the carcinogens contained in cigarette smoke also affect the nonsmoker inhaling “secondhand” or “sidestream smoke”, making “passive smoking” another important cause of lung cancer. A small proportion of lung cancers are caused by substances encountered at work (e.g., asbestos, radiation, arsenic, and mustard gas). Exposure to radon gas in homes may also be an important cause in a small number of cases. The rate of lung cancer among men as a whole in the U.S. has been declining in recent years; however the incidence rates in black males is almost 50 percent higher than the rate in white males. Conversely, the incidence rate in both black and white women has risen dramatically and can be attributed to the increase in the number of women who have smoked. It has been estimated that over 80% of lung cancer cases could have been prevented, and treatment is currently limited in its effectiveness.

[0007] Lung cancers can be divided into two major types: small cell lung cancer and non-small cell lung cancer. The different types of carcinomas involve different regions of the lung, grow and spread in different ways, and are treated differently. Therefore, identifying the type of lung cancer a patient has is extremely important.

[0008] Non-small cell lung cancer is more common than small cell lung cancer and is usually associated with prior smoking, passive smoking, or radon exposure. The main types of non-small lung cancer are named for the type of cells found in the cancer (e.g., squamous cell carcinoma (also called epidermoid carcinoma), adenocarcinoma, large cell carcinoma, adenosquamous carcinoma, and undifferentiated carcinoma). Non-small cell lung cancer generally becomes malignant more slowly than small cell lung cancer. Patients with non-small lung cancer can be divided into three groups. The first group, with the best prognosis, has tumors that are surgically resectable. The second group includes patients with either locally or regionally advanced lung cancer who have a diverse natural history. The final group have distant metastases found at the time of diagnosis. Unfortunately, treatment is not satisfactory for almost all patients with non-small cell lung cancer.

[0009] Small cell lung cancer, or oat cell cancer, is the less common lung cancer type, accounting for about 20% of all lung cancer. Small cell lung cancer is usually found in people who smoke or have smoked cigarettes. Without treatment, small cell carcinoma has the most aggressive clinical course of any type of pulmonary tumor, with median survival from diagnosis of only two to four months.

[0010] The prognosis and choice of treatment for lung cancer depend on the stage of the cancer, tumor size, type of lung cancer, symptoms, and the patient's general health. Patients with non-small cell lung cancer are commonly treated with surgical resection, radiation, chemotherapy or a combination of the three treatments. For operable patients, prognosis is adversely influenced by the presence of pulmonary symptoms, large tumor size, presence of the erbB-2 oncoprotein, mutation of the K-ras gene, vascular invasion, and increased numbers of blood vessels in the tumor.

[0011] Because of its propensity for distant metastases, patients with small cell lung cancer usually require more aggressive treatments. Localized forms of treatment, such as surgical resection or radiation therapy, rarely produce long-term survival. Currently, only chemotherapy regimens can unequivocally prolong survival. However, the overall survival of patients with small cell lung cancer at 5 years is 5% to 10%.

[0012] Regardless of type and stage, the current prognosis for patients with lung cancer is unsatisfactory even though there have been considerable improvements in diagnosis and therapy over the past decade. To further complicate the problem, lung cancer is very difficult to detect. Symptoms of lung cancer include chronic cough, hoarseness, coughing up blood or rusty-colored sputum, weight loss and loss of appetite, shortness of breath, fever without a known reason, wheezing, recurring infections such as bronchitis and pneumonia, chest pain. When symptoms do occur and by the time a patient seeks medical attention for their symptoms, the cancer has often progressed to an advanced state, rendering it virtually incurable. Consequently, research has recently been focused on early detection of tumor markers before the cancer becomes clinically apparent and while the cancer is still localized and amenable to therapy.

[0013] Particular interest has been given to the identification of antigens associated with lung cancer. These antigens have been used in screening, diagnosis, clinical management, and potential treatment of lung cancer. However, there is a continuing need to identify specific antigens associated with lung cancer and to generate monoclonal antibodies (MAb) to these antigens for developing tools for diagnosing cancer, targeting drugs and other treatments to particular sites in the body, imaging tumors for radiotherapy, and possibly generating therapeutic agents for cancer. Because of the importance of early detection in the intervention of lung cancer, there remains a need for a practical method to diagnose lung cancer as close to its inception as possible. In order for early detection to be feasible, it is important that specific markers are found and their sequences elucidated.

[0014] The discovery of new human lung cancer associated polynucleotides, the polypeptides encoded by them, and antibodies that immunospecifically bind these polypeptides, satisfies a need in the art by providing new compositions which are useful in the diagnosis, treatment, prevention and/or prognosis of disorders of the lung, including, but not limited to, small cell lung cancer, non-small cell lung cancer (e.g., squamous cell carcinoma (also called epidermoid carcinoma), adenocarcinoma, large cell carcinoma, adenosquamous carcinoma, and undifferentiated carcinoma), lung cancer metastases, and/or as described under “Hyperproliferative Disorders” and “Respiratory Disorders” below.

### SUMMARY OF THE INVENTION

[0015] The present invention includes isolated nucleic acid molecules comprising, or alternatively, consisting of, a lung and/or lung cancer associated polynucleotide sequence disclosed in the sequence listing (as SEQ ID Nos:1 to 443) and/or contained in a human cDNA clone described in Tables 1, 2 and 5 and deposited with the American Type Culture Collection (“ATCC”). Fragments, variant, and derivatives of these nucleic acid molecules are also encompassed by the invention. The present invention also includes isolated nucleic acid molecules comprising, or alternatively consisting of, a polynucleotide encoding a lung or lung cancer polypeptide. The present invention further includes lung and/or lung cancer polypeptides encoded by these polynucleotides. Further provided for are amino acid sequences comprising, or alternatively consisting of, lung and/or lung cancer polypeptides as disclosed in the sequence listing (as SEQ ID NOs: 444 to 886) and/or encoded by a human cDNA clone described in Tables 1, 2 and 5 and deposited with the ATCC. Antibodies that bind these polypeptides are also encompassed by the invention. Polypeptide fragments, variants, and derivatives of these amino acid sequences are also encompassed by the invention, as are polynucleotides encoding these polypeptides and antibodies that bind these polypeptides. Also provided are diagnostic methods for diagnosing and treating, preventing, and/or prognosing disorders related to the lung, including lung cancer, and therapeutic methods for treating such disorders. The invention further relates to screening methods for identifying agonists and antagonists of lung cancer antigens of the invention.

### DETAILED DESCRIPTION

[0016] Tables

[0017] Table 1 summarizes some of the lung cancer antigens encompassed by the invention (including contig sequences (SEQ ID NO:X) and the cDNA clone related to the contig sequence) and further summarizes certain characteristics of the lung cancer polynucleotides and the polypeptides encoded thereby. The first column shows the “SEQ ID NO:” for each of the 443 lung cancer antigen polynucleotide sequences of the invention. The second column provides a unique “Sequence/Contig ID” identification for each lung and/or lung cancer associated sequence. The third column, “Gene Name,” and the fourth column, “Overlap,” provide a putative identification of the gene based on the sequence similarity of its translation product to an amino acid sequence found in a publicly accessible gene database and the database accession no. for the database sequence having similarity, respectively. The fifth and sixth columns provide the location (nucleotide position nos. within the contig), “Start” and “End”, in the polynucleotide sequence “SEQ ID NO:X” that delineate the preferred ORF shown in the sequence listing as SEQ ID NO:Y. The seventh and eighth columns provide the “% Id” (percent identity) and “% Si” (percent similarity), respectively, observed between the aligned sequence segments of the translation product of SEQ ID NO:X and the database sequence. The ninth column provides a unique “Clone ID” for a cDNA clone related to each contig sequence.

[0018] Table 2 summarizes ATCC Deposits, Deposit dates, and ATCC designation numbers of deposits made with the ATCC in connection with the present application.

[0019] Table 3 indicates public ESTs, of which at least one, two, three, four, five, ten, fifteen or more of any one or more of these public EST sequences are optionally excluded from certain embodiments of the invention.

[0020] Table 4 lists residues comprising antigenic epitopes of antigenic epitope-bearing fragments present in most of the lung or lung cancer associated polynucleotides described in Table 1 as predicted by the inventors using the algorithm of Jameson and Wolf, (1988) Comp. Appl. Biosci. 4:181-186. The Jameson-Wolf antigenic analysis was performed using the computer program PROTEAN (Version 3.11 for the Power MacIntosh, DNASTAR, Inc., 1228 South Park Street Madison, Wis.). Lung and lung cancer associated polypeptides (e.g., SEQ ID NO:Y, polypeptides encoded by SEQ ID NO:X, or polypeptides encoded by the cDNA in the referenced cDNA clone) may possess one or more antigenic epitopes comprising residues described in Table 4. It will be appreciated that depending on the analytical criteria used to predict antigenic determinants, the exact address of the determinant may vary slightly. The residues and locations shown in column two of Table 4 correspond to the amino acid sequences for most lung and lung cancer associated polypeptide sequence shown in the Sequence Listing.

[0021] Table 5 shows the cDNA libraries sequenced, and ATCC designation numbers and vector information relating to these cDNA libraries.

### DEFINITIONS

[0022] The following definitions are provided to facilitate understanding of certain terms used throughout this specification.

[0023] In the present invention, “isolated” refers to material removed from its original environment (e.g., the natural environment if it is naturally occurring), and thus is altered “by the hand of man” from its natural state. For example, an isolated polynucleotide could be part of a vector or a composition of matter, or could be contained within a cell, and still be “isolated” because that vector, composition of matter, or particular cell is not the original environment of the polynucleotide. The term “isolated” does not refer to genomic or cDNA libraries, whole cell total or mRNA preparations, genomic DNA preparations (including those separated by electrophoresis and transferred onto blots), sheared whole cell genomic DNA preparations or other compositions where the art demonstrates no distinguishing features of the polynucleotide/sequences of the present invention.

[0024] As used herein, a “polynucleotide” refers to a molecule having a nucleic acid sequence contained in SEQ ID NO:X (as described in column 1 of Table 1) or the related cDNA clone (as described in column 9 of Table 1 and contained within a library deposited with the ATCC). For example, the polynucleotide can contain the nucleotide sequence of the full length cDNA sequence, including the 5′ and 3′ untranslated sequences, the coding region, as well as fragments, epitopes, domains, and variants of the nucleic acid sequence. Moreover, as used herein, a “polypeptide” refers to a molecule having an amino acid sequence encoded by a polynucleotide of the invention as broadly defined (obviously excluding poly-Phenylalanine or poly-Lysine peptide sequences which result from translation of a polyA tail of a sequence corresponding to a cDNA).

[0025] In the present invention, “SEQ ID NO:X” was often generated by overlapping sequences contained in multiple clones (contig analysis). A representative clone containing all or most of the sequence for SEQ ID NO:X is deposited at Human Genome Sciences, Inc. (HGS) in a catalogued and archived library. As shown in column 9 of Table 1, each clone is identified by a cDNA Clone ID. Each Clone ID is unique to an individual clone and the Clone ID is all the information needed to retrieve a given clone from the HGS library. In addition to the individual cDNA clone deposits, most of the cDNA libraries from which the clones were derived were deposited at the American Type Culture Collection (hereinafter “ATCC”). Table 5 provides a list of the deposited cDNA libraries. One can use the Clone ID to determine the library source by reference to Tables 2 and 5. Table 5 lists the deposited cDNA libraries by name and links each library to an ATCC Deposit. Library names contain four characters, for example, “HTWE.” The name of a cDNA clone (“Clone ID”) isolated from that library begins with the same four characters, for example “HTWEP07”. As mentioned below, Table 1 correlates the Clone ID names with SEQ ID NOs. Thus, starting with a SEQ ID NO, one can use Tables 1, 2 and 5 to determine the corresponding Clone ID, from which library it came and in which ATCC deposit the library is contained. Furthermore, it is possible to retrieve a given cDNA clone from the source library by techniques known in the art and described elsewhere herein. The ATCC is located at 10801 University Boulevard, Manassas, Va. 20110-2209, USA. The ATCC deposits were made persuant to the terms of the Budapest Treaty on the international recognition of the deposit of microorganisms for the purposes of patent procedure.

[0026] A “polynucleotide” of the present invention also includes those polynucleotides capable of hybridizing, under stringent hybridization conditions, to sequences contained in SEQ ID NO:X, or the complement thereof (e.g., the complement of any one, two, three, four, or more of the polynucleotide fragments described herein), and/or sequences contained in the related cDNA clone within a library deposited with the ATCC. “Stringent hybridization conditions” refers to an overnight incubation at 42 degree C in a solution comprising 50% formamide, 5× SSC (750 mM NaCl, 75 mM trisodium citrate), 50 mM sodium phosphate (pH 7.6), 5× Denhardt's solution, 10% dextran sulfate, and 20 μg/ml denatured, sheared salmon sperm DNA, followed by washing the filters in 0.1× SSC at about 65 degree C.

[0027] Also included within “polynucleotides” of the present invention are nucleic acid molecules that hybridize to the polynucleotides of the present invention at lower stringency hybridization conditions. Changes in the stringency of hybridization and signal detection are primarily accomplished through the manipulation of formamide concentration (lower percentages of formamide result in lowered stringency); salt conditions, or temperature. For example, lower stringency conditions include an overnight incubation at 37 degree C in a solution comprising 6× SSPE (20× SSPE=3M NaCl; 0.2M NaH₂PO₄; 0.02M EDTA, pH 7.4), 0.5% SDS, 30% formamide, 100 ug/ml salmon sperm blocking DNA; followed by washes at 50 degree C with 1× SSPE, 0.1% SDS. In addition, to achieve even lower stringency, washes performed following stringent hybridization can be done at higher salt concentrations (e.g. 5× SSC).

[0028] Note that variations in the above conditions may be accomplished through the inclusion and/or substitution of alternate blocking reagents used to suppress background in hybridization experiments. Typical blocking reagents include Denhardt's reagent, BLOTTO, heparin, denatured salmon sperm DNA, and commercially available proprietary formulations. The inclusion of specific blocking reagents may require modification of the hybridization conditions described above, due to problems with compatibility.

[0029] Of course, a polynucleotide which hybridizes only to polyA+ sequences (such as any 3′ terminal polyA+ tract of a cDNA shown in the sequence listing), or to a complementary stretch of T (or U) residues, would not be included in the definition of “polynucleotide,” since such a polynucleotide would hybridize to any nucleic acid molecule containing a poly (A) stretch or the complement thereof (e.g., practically any double-stranded cDNA clone generated using oligo dT as a primer).

[0030] The polynucleotides of the present invention can be composed of any polyribonucleotide or polydeoxribonucleotide, which may be unmodified RNA or DNA or modified RNA or DNA. For example, polynucleotides can be composed of single- and double-stranded DNA, DNA that is a mixture of single- and double-stranded regions, single- and double-stranded RNA, and RNA that is mixture of single- and double-stranded regions, hybrid molecules comprising DNA and RNA that may be single-stranded or, more typically, double-stranded or a mixture of single- and double-stranded regions. In addition, the polynucleotide can be composed of triple-stranded regions comprising RNA or DNA or both RNA and DNA. A polynucleotide may also contain one or more modified bases or DNA or RNA backbones modified for stability or for other reasons. “Modified” bases include, for example, tritylated bases and unusual bases such as inosine. A variety of modifications can be made to DNA and RNA; thus, “polynucleotide” embraces chemically, enzymatically, or metabolically modified forms.

[0031] In specific embodiments, the polynucleotides of the invention are at least 15, at least 30, at least 50, at least 100, at least 125, at least 500, or at least 1000 continuous nucleotides but are less than or equal to 300 kb, 200 kb, 100 kb, 50 kb, 15 kb, 10 kb, 7.5kb, 5 kb, 2.5 kb, 2.0 kb, or 1 kb, in length. In a further embodiment, polynucleotides of the invention comprise a portion of the coding sequences, as disclosed herein, but do not comprise all or a portion of any intron. In another embodiment, the polynucleotides comprising coding sequences do not contain coding sequences of a genomic flanking gene (i.e., 5′ or 3′ to the gene of interest in the genome). In other embodiments, the polynucleotides of the invention do not contain the coding sequence of more than 1000, 500, 250, 100, 50, 25, 20, 15, 10, 5, 4, 3, 2, or 1 genomic flanking gens).

[0032] “SEQ ID NO:X” refers to a lung cancer antigen polynucleotide sequence described in Table 1. SEQ ID NO:X is identified by an integer specified in column 1 of Table 1. The polypeptide sequence SEQ ID NO:Y is a translated open reading frame (ORF) encoded by polynucleotide SEQ ID NO:X. There are 443 lung cancer antigen polynucleotide sequences described in Table 1 and shown in the sequence listing (SEQ ID NO: 1 through SEQ ID NO:443). Likewise there are 443 polypeptide sequences shown in the sequence listing, one polypeptide sequence for each of the polynucleotide sequences (SEQ ID NO:444 through SEQ ID NO:886). The polynucleotide sequences are shown in the sequence listing immediately followed by all of the polypeptide sequences. Thus, a polypeptide sequence corresponding to polynucleotide sequence SEQ ID NO:1 is the first polypeptide sequence shown in the sequence listing. The second polypeptide sequence corresponds to the polynucleotide sequence shown as SEQ ID NO:2, and so on. In otherwords, since there are 443 polynucleotide sequences, for any polynucleotide sequence SEQ ID NO:X, a corresponding polypeptide SEQ ID NO:Y can be determined by the formula X+443=Y. In addition, any of the unique “Sequence/Contig ID” defined in column 2 of Table 1, can be linked to the corresponding polypeptide SEQ ID NO:Y by reference to Table 4.

[0033] The polypeptides of the present invention can be composed of amino acids joined to each other by peptide bonds or modified peptide bonds, i.e., peptide isosteres, and may contain amino acids other than the 20 gene-encoded amino acids. The polypeptides may be modified by either natural processes, such as posttranslational processing, or by chemical modification techniques which are well known in the art. Such modifications are well described in basic texts and in more detailed monographs, as well as in a voluminous research literature. Modifications can occur anywhere in a polypeptide, including the peptide backbone, the amino acid side-chains and the amino or carboxyl termini. It will be appreciated that the same type of modification may be present in the same or varying degrees at several sites in a given polypeptide. Also, a given polypeptide may contain many types of modifications. Polypeptides may be branched, for example, as a result of ubiquitination, and they may be cyclic, with or without branching. Cyclic, branched, and branched cyclic polypeptides may result from posttranslation natural processes or may be made by synthetic methods. Modifications include acetylation, acylation, ADP-ribosylation, amidation, covalent attachment of flavin, covalent attachment of a heme moiety, covalent attachment of a nucleotide or nucleotide derivative, covalent attachment of a lipid or lipid derivative, covalent attachment of phosphotidylinositol, cross-linking, cyclization, disulfide bond formation, demethylation, formation of covalent cross-links, formation of cysteine, formation of pyroglutamate, formylation, gamma-carboxylation, glycosylation, GPI anchor formation, hydroxylation, iodination, methylation, myristoylation, oxidation, pegylation, proteolytic processing, phosphorylation, prenylation, racemization, selenoylation, sulfation, transfer-RNA mediated addition of amino acids to proteins such as arginylation, and ubiquitination. (See, for instance, PROTEINS—STRUCTURE AND MOLECULAR PROPERTIES, 2nd Ed., T. E. Creighton, W. H. Freeman and Company, New York (1993); POSTTRANSLATIONAL COVALENT MODIFICATION OF PROTEINS, B. C. Johnson, Ed., Academic Press, New York, pgs. 1-12 (1983); Seifter et al., Meth Enzymol 182:626-646 (1990); Rattan et al., Ann NY Acad Sci 663:48-62 (1992).)

[0034] The lung and lung cancer polypeptides of the invention can be prepared in any suitable manner. Such polypeptides include isolated naturally occurring polypeptides, recombinantly produced polypeptides, synthetically produced polypeptides, or polypeptides produced by a combination of these methods. Means for preparing such polypeptides are well understood in the art.

[0035] The polypeptides may be in the form of the secreted protein, including the mature form, or may be a part of a larger protein, such as a fusion protein (see below). It is often advantageous to include an additional amino acid sequence which contains secretory or leader sequences, pro-sequences, sequences which aid in purification, such as multiple histidine residues, or an additional sequence for stability during recombinant production.

[0036] The lung and lung cancer polypeptides of the present invention are preferably provided in an isolated form, and preferably are substantially purified. A recombinantly produced version of a polypeptide, including the secreted polypeptide, can be substantially purified using techniques described herein or otherwise known in the art, such as, for example, by the one-step method described in Smith and Johnson, Gene 67:31-40 (1988). Polypeptides of the invention also can be purified from natural, synthetic or recombinant sources using techniques described herein or otherwise known in the art, such as, for example, antibodies of the invention raised against the polypeptides of the present invention in methods which are well known in the art.

[0037] By a polypeptide demonstrating a “functional activity” is meant, a polypeptide capable of displaying one or more known functional activities associated with a full-length (complete) protein of the invention. Such functional activities include, but are not limited to, biological activity, antigenicity [ability to bind (or compete with a polypeptide for binding) to an anti-polypeptide antibody], immunogenicity (ability to generate antibody which binds to a specific polypeptide of the invention), ability to form multimers with polypeptides of the invention, and ability to bind to a receptor or ligand for a polypeptide.

[0038] “A polypeptide having functional activity” refers to polypeptides exhibiting activity similar, but not necessarily identical to, an activity of a polypeptide of the present invention, including mature forms, as measured in a particular assay, such as, for example, a biological assay, with or without dose dependency. In the case where dose dependency does exist, it need not be identical to that of the polypeptide, but rather substantially similar to the dose-dependence in a given activity as compared to the polypeptide of the present invention (i.e., the candidate polypeptide will exhibit greater activity or not more than about 25-fold less and, preferably, not more than about tenfold less activity, and most preferably, not more than about three-fold less activity relative to the polypeptide of the present invention).

[0039] The functional activity of the lung cancer antigen polypeptides, and fragments, variants derivatives, and analogs thereof, can be assayed by various methods.

[0040] For example, in one embodiment where one is assaying for the ability to bind or compete with full-length polypeptide of the present invention for binding to an antibody to the full length polypeptide antibody, various immunoassays known in the art can be used, including but not limited to, competitive and non-competitive assay systems using techniques such as radioimmunoassays, ELISA (enzyme linked immunosorbent assay), “sandwich” immunoassays, immunoradiometric assays, gel diffusion precipitation reactions, immunodiffusion assays, in situ immunoassays (using colloidal gold, enzyme or radioisotope labels, for example), western blots, precipitation reactions, agglutination assays (e.g., gel agglutination assays, hemagglutination assays), complement fixation assays, immunofluorescence assays, protein A assays, and immunoelectrophoresis assays, etc. In one embodiment, antibody binding is detected by detecting a label on the primary antibody. In another embodiment, the primary antibody is detected by detecting binding of a secondary antibody or reagent to the primary antibody. In a further embodiment, the secondary antibody is labeled. Many means are known in the art for detecting binding in an immunoassay and are within the scope of the present invention.

[0041] In another embodiment, where a ligand is identified, or the ability of a polypeptide fragment, variant or derivative of the invention to multimerize is being evaluated, binding can be assayed, e.g., by means well-known in the art, such as, for example, reducing and non-reducing gel chromatography, protein affinity chromatography, and affinity blotting. See generally, Phizicky, E., et al., Microbiol. Rev. 59:94-123 (1995). In another embodiment, physiological correlates polypeptide of the present invention binding to its substrates (signal transduction) can be assayed.

[0042] In addition, assays described herein (see Examples) and otherwise known in the art may routinely be applied to measure the ability of polypeptides of the present invention and fragments, variants derivatives and analogs thereof to elicit polypeptide related biological activity (either in vitro or in vivo). Other methods will be known to the skilled artisan and are within the scope of the invention.

[0043] Lung and Lung Cancer Associated Polynucleotides and Polypeptides of the Invention

[0044] It has been discovered herein that the polynucleotides described in Table 1 are expressed at significantly enhanced levels in human lung and/or lung cancer tissues. Accordingly, such polynucleotides, polypeptides encoded by such polynucleotides, and antibodies specific for such polypeptides find use in the prediction, diagnosis, prevention and treatment of lung related disorders, including lung cancer as more fully described below.

[0045] Table 1 summarizes some of the polynucleotides encompassed by the invention (including contig sequences (SEQ ID NO:X) and the related cDNA clones) and further summarizes certain characteristics of these lung and/or lung cancer associated polynucleotides and the polypeptides encoded thereby.

TABLE 1

| Seq | | | | | | | | |
|---|---|---|---|---|---|---|---|---|
| ID | Sequence/ | | | HGS Nucleotide | | % | % | |
| No. | Contig ID | Gene Name | Overlap | Start | End | Id | Si | Clone ID |
| 1 | 507002 | nuclear protein Skip [Homo sapiens] >gi\|3417599 | gi\|1236986 | 2 | 970 | 91 | 91 | HAJAW79 |
| | | (AF045184) nuclear receptor coactivator NCoA-62 | | | | | | |
| | | [Homo sapiens] | | | | | | |
| 2 | 508935 | (AF053651) cellular apoptosis susceptibility protein | gi\|3598795 | 1 | 1920 | 98 | 98 | HDLAG79 |
| | | [Homo sapiens] >sp\|O75432\|O75432 CELLULAR | | | | | | |
| | | APOPTOSIS SUSCEPTIBILITY PROTEIN. | | | | | | |
| | | Length = 971 | | | | | | |
| 3 | 518959 | | | 257 | 727 | | | HIBCM71 |
| 4 | 539756 | IgG Fc fragment receptor precursor [Homo sapiens] | gi\|182474 | 51 | 293 | 98 | 98 | HAPBV45 |
| | | >pir\|JL0118\|JL0118 Fc gamma (IgG) receptor IIa | | | | | | |
| | | precursor - human >sp\|P12318\|FCGA_HUMAN | | | | | | |
| | | LOW AFFINITY IMMUNOGLOBULIN GAMMA | | | | | | |
| | | FC RECEPTOR II-A PRECURSOR (FC-GAMMA | | | | | | |
| | | RII-A) (FCRII-A) (IGG FC RECEPTOR II-A) | | | | | | |
| | | (CD32) | | | | | | |
| 5 | 540125 | cyclin H [Homo sapiens] >gi\|532561 cyclin H | gi\|536920 | 80 | 1099 | 95 | 95 | HFPCA09 |
| | | [Homo sapiens] >pir\|I38731\|I38731 cyclin H - | | | | | | |
| | | human >sp\|P51946\|CYCH_HUMAN CYCLIN H | | | | | | |
| | | (MO15-ASSOCIATED PROTEIN) (P37) (P34). | | | | | | |
| | | Length = 323 | | | | | | |
| 6 | 540275 | leukotriene A-4 hydrolase precursor [Homo sapiens] | gi\|307130 | 72 | 1946 | 100 | 100 | HSBAG12 |
| | | >gi\|307131 leukotriene A4 hydrolase [Homo | | | | | | |
| | | sapiens] >gi\|976396 leukotriene A4 hydrolase | | | | | | |
| | | [Homo sapiens] | | | | | | |
| 7 | 540331 | | | 235 | 519 | | | HAPOO45 |
| 8 | 540955 | | | 1052 | 1492 | | | HMAJJ62 |
| 9 | 541251 | M1 subunit of ribonucleotide reductase [Homo | gi\|36065 | 9 | 1469 | 98 | 98 | HHFFY81 |
| | | sapiens] >gi\|36153 large subunit ribonucleotide | | | | | | |
| | | reductase [Homo sapiens] >pir\|S16680\|S16680 | | | | | | |
| | | ribonucleoside-diphosphate reductase (EC 1.17.4.1) | | | | | | |
| | | chain M1 - human Length = 792 | | | | | | |
| 10 | 541978 | collagen alpha 3(VI) chain precursor - human | pir\|S13679\|CGHU3A | 2 | 991 | 99 | 99 | HOHBK75 |
| | | Length = 2970 | | | | | | |
| 11 | 547680 | actin bundling protein [Homo sapiens] >gi\|458028 | gi\|497269 | 1 | 840 | 100 | 100 | HDPHH09 |
| | | actin bundling protein [Homo sapiens] | | | | | | |
| | | >pir\|I38621\|I38621 actin bundling protein - human | | | | | | |
| | | >sp\|Q16658\|FASC_HUMAN FASCIN (ACTIN | | | | | | |
| | | BUNDLING PROTEIN). Length = 493 | | | | | | |
| 12 | 547705 | galactose-1-phosphate uridyl transferase [Homo | gi\|182951 | 3 | 767 | 94 | 94 | HCHMZ75 |
| | | sapiens] >gi\|182951 galactose-1-phosphate uridyl | | | | | | |
| | | transferase [Homo sapiens] | | | | | | |
| 13 | 549763 | cyclin-dependent protein kinase, type 4 [Homo | gi\|456427 | 291 | 1124 | 92 | 92 | HMGBP27 |
| | | sapiens] >gi\|1353416 cyclin-dependent kinase 4 | | | | | | |
| | | [Homo sapiens] >sp\|P11802\|CDK4_HUMAN | | | | | | |
| | | CELL DIVISION PROTEIN KINASE 4 | | | | | | |
| | | (EC 2.7.1.-) (CYCLIN-DEPENDENT KINASE 4) | | | | | | |
| | | (PSK-J3). Length = 303 | | | | | | |
| 14 | 549819 | sufactant apoprotein 18 precursor [Homo sapiens] | gi\|338298 | 1 | 105 | 100 | 100 | HAPQT93 |
| | | Length = 243 | | | | | | |
| 15 | 549820 | sufactant apoprotein 18 precursor [Homo sapiens] | gi\|338298 | 3 | 464 | 75 | 82 | HFTDY88 |
| | | Length = 243 | | | | | | |
| 16 | 549944 | von Willebrand factor [Homo sapiens] | gi\|1340356 | 741 | 1928 | 100 | 100 | HUVEG60 |
| | | >pir\|A34480\|VWHU von Willebrand factor | | | | | | |
| | | precursor - human >gi\|553810 von Willebrand | | | | | | |
| | | factor [Homo sapiens] {SUB 990-1947} | | | | | | |
| | | >gnl\|PID\|e222518 von Willebrand factor | | | | | | |
| | | [Homo sapiens] {SUB 1-178} | | | | | | |
| | | >gi\|340316 von Willebrand antige | | | | | | |
| 17 | 551426 | connexin 40 [Homo sapiens] Length = 358 | gi\|1220303 | 1 | 372 | 97 | 97 | HAPQN48 |
| 18 | 552182 | macrophage lectin 2 [Homo sapiens] | gnl\|PID\|d1009736 | 696 | 923 | 98 | 98 | HDPFQ65 |
| | | >sp\|Q14538\|Q14538 MACROPHAGE LECTIN 2. | | | | | | |
| | | Length = 292 | | | | | | |
| 19 | 552540 | lung surfactant protein D [Homo sapiens] Length = | gi\|134767 | 1 | 414 | 96 | 96 | HAPQD13 |
| | | 375 | | | | | | |
| 20 | 553367 | (AF053944) aortic carboxypeptidase-like protein | gi\|3288916 | 423 | 1160 | 98 | 99 | HDTDB06 |
| | | ACLP [Homo sapiens] >sp\|G3288916\|G3288916 | | | | | | |
| | | AORTIC CARBOXYPEPTIDASE-LIKE PROTEIN | | | | | | |
| | | ACLP. >gnl\|PID\|d1013781 AEBP1 [Homo sapiens] | | | | | | |
| | | {SUB 314-1158} Length = 1158 | | | | | | |
| 21 | 554326 | SAS [Homo sapiens] >sp\|O00577\|O00577 COSMID | gi\|2209293 | 500 | 1195 | 92 | 93 | HSDJF42 |
| | | 6E5 CDK4, SAS AND KIAA0167 GENES, | | | | | | |
| | | COMPLETE CDS, AND OS9. Length = 227 | | | | | | |
| 22 | 554657 | biliverdin-IXbeta reductase I [Homo sapiens] | gnl\|PID\|d1007449 | 69 | 713 | 93 | 93 | HMUAP34 |
| | | >gnl\|PID\|d1005912 NADPH-flavin reductase | | | | | | |
| | | [Homo sapiens] >pir\|JC2070\|JC2070 NADPH | | | | | | |
| | | dehydrogenase (flavin) (EC 1.6.8.2) - human | | | | | | |
| | | >sp\|P30043\|FLRE_HUMAN FLAVIN | | | | | | |
| | | REDUCTASE (EC 1.6.99.1) (FR) (NADPH- | | | | | | |
| | | DEPENDENT DIAPHORASE | | | | | | |
| 23 | 556156 | nuclear chloride ion channel protein [Homo sapiens] | gi\|2073569 | 243 | 635 | 94 | 96 | HMEFP33 |
| | | >sp\|O00299\|CLI1_HUMAN CHLORIDE | | | | | | |
| | | INTRACELLULAR CHANNEL PROTEIN 1 | | | | | | |
| | | (NUCLEAR CHLORIDE ION CHANNEL 27) (P64 | | | | | | |
| | | CLCP). Length = 241 | | | | | | |
| 24 | 557747 | prepro-plasma carboxypeptidase B [Homo sapiens] | gi\|189687 | 113 | 745 | 96 | 96 | HLQBO43 |
| | | >pir\|A41204\|A41204 carboxypeptidase B (EC | | | | | | |
| | | 3.4.17.2) CPB2 precursor - human | | | | | | |
| | | >sp\|Q15114\|Q15114 PREPRO-PLASMA | | | | | | |
| | | CARBOXYPEPTIDASE B. Length = 423 | | | | | | |
| 25 | 558599 | COX5B [Homo sapiens] >gi\|18094l cytochrome c | gi\|180937 | 2 | 478 | 87 | 88 | HMCBO59 |
| | | oxidase precursor (EC 1.9.3.1) [Homo sapiens] | | | | | | |
| | | >pir\|JT0324\|OTHU5B cytochrome-c oxidase (EC | | | | | | |
| | | 1.9.3.1) chain Vb precursor - human | | | | | | |
| 26 | 572403 | | | 434 | 607 | | | HLJDU16 |
| 27 | 573366 | | | 41 | 163 | | | HBAMD71 |
| 28 | 573986 | | | 159 | 338 | | | HYACJ68 |
| 29 | 575435 | VDUP1 = 1,25-dihydroxyvitamin D-3 up-regulated | bbs\|155932 | 297 | 1490 | 94 | 94 | HBHMH57 |
| | | [human, HL-60 promyelocytic leukemia cells, | | | | | | |
| | | Peptide, 391 aa] [Homo sapiens] Length = 391 | | | | | | |
| 30 | 584341 | pulmonary surfactant-associated protein [Homo | gi\|190672 | 90 | 866 | 99 | 99 | HAPOA63 |
| | | sapiens] Length 248 | | | | | | |
| 31 | 584435 | CD53 glycoprotein [Homo sapiens] >gi\|180141 cell | gi\|180143 | 122 | 814 | 89 | 89 | HUFAR85 |
| | | surface antigen [Homo sapiens] | | | | | | |
| | | >pir\|A37243\|A37243 | | | | | | |
| | | hemopoietic cell surface glycoprotein CD53 - | | | | | | |
| | | human >sp\|P19397\|CD53_HUMAN | | | | | | |
| | | LEUKOCYTE SURFACE ANTIGEN CD53 (CELL | | | | | | |
| | | SURFACE GLYCOPROTEIN CD53). | | | | | | |
| | | Length = 219 | | | | | | |
| 32 | 585187 | enigma protein [Homo sapiens] | gi\|561637 | 1 | 1494 | 77 | 79 | HMEJD03 |
| | | >pir\|A55050\|A55050 enigma - human | | | | | | |
| 33 | 585658 | transcobalamin II [Homo sapiens] | gi\|339196 | 85 | 888 | 91 | 91 | HMAGB31 |
| | | >pir\|A39744\|A39744 transcobalamin II precursor - | | | | | | |
| | | human >gi\|2952291 (AF047576) transcobalamin II | | | | | | |
| | | [Homo sapiens] {SUB 1-21} | | | | | | |
| | | >sp\|G298394\|G298394 | | | | | | |
| | | TRANSCOBALAMIN II ISOPEPTIDE A (N- | | | | | | |
| | | TERMINAL). {SUB 1-26} Length = 427 | | | | | | |
| 34 | 585693 | PECAM-1 precursor [Homo sapiens] | gi\|189776 | 759 | 2405 | 92 | 92 | HMSAO07 |
| | | >pir\|A40096\|A40096 platelet-endothelial cell | | | | | | |
| | | adhesion molecule-1 (CD31) precursor - human | | | | | | |
| | | >sp\|P16284\|PEC1_HUMAN PLATELET | | | | | | |
| | | ENDOTHELIAL CELL ADHESION MOLECULE | | | | | | |
| | | PRECURSOR (PECAM-1) (CD31 ANTIGEN) | | | | | | |
| | | (ENDOCAM) (GPIIA′). >bbs\|13897 | | | | | | |
| 35 | 585701 | preprocathepsin H (AA −22 to 314) [Homo sapiens] | gi\|29710 | 3 | 1094 | 99 | 100 | HDPJP49 |
| | | >pir\|S12486\|KHHUH cathepsin H (EC 3.4.22.16) | | | | | | |
| | | precursor - human >sp\|P09668\|CATH_HUMAN | | | | | | |
| | | CATHEPSIN H PRECURSOR (EC 3.4.22.16). | | | | | | |
| | | >gi\|29708 cathepsin H [Homo sapiens] {SUB 88- | | | | | | |
| | | 335} Length = 335 | | | | | | |
| 36 | 586019 | major group rhinovirus receptor precusor [Homo | gi\|306895 | 2 | 1354 | 95 | 95 | HOGAH59 |
| | | sapiens] Length = 532 | | | | | | |
| 37 | 587225 | cytotoxin serine protease-C precursor [Homo | gi\|181164 | 32 | 865 | 100 | 100 | HWAAB59 |
| | | sapiens] >gi\|183155 cytotoxic T-lymphocyte- | | | | | | |
| | | associated serine esterase 1 [Homo sapiens] | | | | | | |
| | | >gi\|181157 cytotoxic serine proteinase [Homo | | | | | | |
| | | sapiens] >gi\|338430 serine protease [Homo sapiens] | | | | | | |
| | | >pir\|A32692\|A32692 cytotoxic | | | | | | |
| 38 | 587445 | Clara cells 10 kda secretory protein [Homo sapiens] | gi\|457935 | 75 | 431 | 91 | 93 | HLJBE03 |
| | | >gi\|457933 Clara cells 10 kda secretory protein | | | | | | |
| | | [Homo sapiens] >gi\|23132 10 kDa secretory | | | | | | |
| | | preprotein (AA −21 to −1) [Homo sapiens] | | | | | | |
| | | >pir\|JS0036\|JS0036 Clara cell 10K protein | | | | | | |
| | | precursor - human >pir\|I38397\| | | | | | | |
| 39 | 587572 | pulmonary surfactant protein SP-C1 [Homo sapiens] | gi\|387030 | 30 | 677 | 91 | 91 | HTFBB76 |
| | | Length = 191 | | | | | | |
| 40 | 587596 | | | 20 | 190 | | | HAPQS32 |
| 41 | 588548 | acid phosphatase type 5 (AA 1-325) [Homo | gi\|34734 | 97 | 1092 | 95 | 95 | HAPNX70 |
| | | sapiens] >pir\|S15752\|S15752 acid phosphatase (EC | | | | | | |
| | | 3.1.3.2) ACP5 precursor - human | | | | | | |
| | | >sp\|G262924\|G262924 TARTRATE-RESISTANT | | | | | | |
| | | ACID PHOSPHATASE PEAK 1 ISOFORM 16 | | | | | | |
| | | KDA SUBUNIT, TRACP PEAK 1 {N- | | | | | | |
| | | TERMINAL}. {SUB 183-203} Len | | | | | | |
| 42 | 588881 | monocyte antigen CD14 [Homo sapiens] >gi\|29741 | gi\|180021 | 240 | 1532 | 89 | 89 | HHFCG79 |
| | | leucine-rich preprotein (AA −19 to 356) [Homo | | | | | | |
| | | sapiens] Length = 375 | | | | | | |
| 43 | 588933 | heparin cofactor II [Homo sapiens] | gi\|183908 | 3 | 1532 | 97 | 97 | HFVHH90 |
| | | >pir\|A37924\|A37924 heparin cofactor II precursor - | | | | | | |
| | | human >sp\|P05546\|HEP2_HUMAN HEPARIN | | | | | | |
| | | COFACTOR II PRECURSOR (HC-II) (PROTEASE | | | | | | |
| | | INHIBITOR LEUSERPIN 2) (HLS2). >gi\|412013 | | | | | | |
| | | proteinase inhibitor [unidentified] {SUB | | | | | | |
| | | 20-499 } >g | | | | | | |
| 44 | 592136 | cytochrome P450 [Homo sapiens] | gi\|501031 | 422 | 991 | 88 | 89 | HDPGB64 |
| | | >pir\|A54116\|A54116 cytochrome P450 1B1 - | | | | | | |
| | | human >sp\|Q16678\|CP1B_HUMAN CYTO- | | | | | | |
| | | CHROME P450 1B1 (EC 1.14.14.1) (CYPIB1). | | | | | | |
| | | Length = 543 | | | | | | |
| 45 | 613777 | | | 2 | 478 | | | HAPNX53 |
| 46 | 614669 | alcohol dehydrogenase [Homo sapiens] | gi\|178372 | 1 | 852 | 100 | 100 | HCEOB63 |
| | | >pir\|A33371\|DEHUE1 aldehyde dehydrogenase | | | | | | |
| | | (NAD+) (EC 1.2.1.3) 1, cytosolic - human | | | | | | |
| | | >sp\|P00352\|DHAC_HUMAN ALDEHYDE | | | | | | |
| | | DEHYDROGENASE, CYTOSOLIC (EC 1.2.1.3) | | | | | | |
| | | (CLASS 1) (ALHDII) (ALDH-E1). {SUB 2-501} | | | | | | |
| | | Length = 501 | | | | | | |
| 47 | 619502 | dJ68O2.2 [Homo sapiens] | gnl\|PID\|e1294465 | 258 | 1244 | 79 | 79 | HCUCB72 |
| | | >sp\|P35579\|MYSN_HUMAN MYOSIN HEAVY | | | | | | |
| | | CHAIN, NONMUSCLE TYPE A (CELLULAR | | | | | | |
| | | MYOSIN HEAVY CHAIN, TYPE A) (NMMHC- | | | | | | |
| | | A). >gi\|553596 cellular myosin heavy chain [Homo | | | | | | |
| | | sapiens] {SUB 1-1337} Length = 1960 | | | | | | |
| 48 | 619525 | stomatin [Homo sapiens] >gi\|(31069 erythrocyte | gnl\|PID\|e140838 | 2 | 928 | 94 | 94 | HHFHJ09 |
| | | band 7 integral membrane protein [Homo sapiens] | | | | | | |
| | | >pir\|S17659\|S17659 membrane protein 7, | | | | | | |
| | | erythrocyte - human >sp\|P27105\|BAN7_HUMAN | | | | | | |
| | | ERYTHROCYTE BAND 7 INTEGRAL | | | | | | |
| | | MEMBRANE PROTEIN (STOMATIN) (PROTEIN | | | | | | |
| | | 7.2B). {SUB 2-2 | | | | | | |
| 49 | 623660 | C protein [Homo sapiens] >pir\|A26885\|A26885 | gi\|306875 | 155 | 559 | 100 | 100 | HDPMR96 |
| | | heterogeneous ribonuclear particle protein C - | | | | | | |
| | | human Length = 290 | | | | | | |
| 50 | 625480 | CD68 = 110kda transmembrane glycoprotein | bbs\|127493 | 1 | 1074 | 65 | 65 | HDPXE17 |
| | | [human, promonocyte cell line U937, Peptide, | | | | | | |
| | | 354 aa][Homo sapiens] >pir\|A48931\|A48931 | | | | | | |
| | | transmembrane glycoprotein CD68, 110K - human | | | | | | |
| | | >sp\|P34810\|CD68_HUMAN MACROSIALIN | | | | | | |
| | | PRECURSOR (GP110) (CD68). >gi\|3511124 | | | | | | |
| | | (AF060540) | | | | | | |
| 51 | 647688 | ALDH7 [Homo sapiens] >pir\|38669\|I38669 | gi\|601780 | 1 | 1290 | 85 | 88 | HCHCC79 |
| | | ALDH7 - human >sp\|P43353\|DHA7_HUMAN | | | | | | |
| | | ALDEHYDE DEHYDROGENASE 7 (EC 1.2.1.5). | | | | | | |
| | | >sp\|G601780\|G601780 ALDH7. Length = 468 | | | | | | |
| 52 | 650865 | DOC1 [Homo sapiens] >sp\|Q13597\|Q13597 | gi\|1297319 | 251 | 1567 | 99 | 99 | HMSBY41 |
| | | MYOSIN HEAVY CHAIN HOMOLOG DOC1. | | | | | | |
| | | Length = 752 | | | | | | |
| 53 | 651676 | retinoic acid binding protein II [Homo sapiens] | gi\|181026 | 120 | 566 | 100 | 100 | HMAID66 |
| | | >gi\|181030 retinoic acid-binding protein II [Homo | | | | | | |
| | | sapiens] >pir\|A45057\|RJHU2 retinoic acid-binding | | | | | | |
| | | protein II, cellular - human Length = 138 | | | | | | |
| 54 | 651751 | ADH beta-1-subunit (aa 1-375) [Homo sapiens] | gi\|28416 | 3 | 1187 | 99 | 99 | HLDOU10 |
| | | >gi\|178111 alcohol dehydrogenase beta-1 subunit | | | | | | |
| | | [Homo sapiens] >gnl\|PID\|d1000528 alcohol | | | | | | |
| | | dehydrogenase beta 1 [Homo sapiens] | | | | | | |
| | | >pir\|A23607\|DEHUAB alcohol dehydrogenase (EC | | | | | | |
| | | 1.1.1.1)2 - human >sp\|P00325\|ADHB_HUMAN | | | | | | |
| 55 | 651787 | hla-dr antigen alpha chain [Homo sapiens] | gi\|307264 | 2 | 844 | 91 | 91 | HDPMQ14 |
| | | >gi\|386945 HLA-DR alpha-chain [Homo sapiens] | | | | | | |
| | | >gi\|307267 HLA-DR alpha-chain [Homo sapiens] | | | | | | |
| | | >pir\|A93952\|HLHUDA MHC class II | | | | | | |
| | | histocompatibility antigen HLA-DR alpha chain | | | | | | |
| | | precursor - human >sp\|P01903\|HA2R_HUMAN | | | | | | |
| | | HLA C | | | | | | |
| 56 | 651840 | creatine kinase [Homo sapiens] >gi\|3702298 | gi\|180588 | 2 | 1339 | 96 | 96 | HHBHB11 |
| | | (AC005781) KCRM_HUMAN; M-CK [Homo | | | | | | |
| | | sapiens] >pir\|A31793\|KIHUCM creatine kinase (EC | | | | | | |
| | | 2.7.3.2) chain M - human | | | | | | |
| | | >sp\|P06732\|KCRM_HUMAN CREATINE | | | | | | |
| | | KINASE, M CHAIN (EC 2.7.3.2) (M-CK). | | | | | | |
| | | >sp\|G3702298\|G3702298 KCRM_HUMAN (EC | | | | | | |
| 57 | 651892 | TGF-b superfamily receptor type I [Homo sapiens] | gi\|425148 | 994 | 1587 | 93 | 96 | HEMDR71 |
| | | >gi\|2228562 activin receptor like kinase 1 [Homo | | | | | | |
| | | sapiens] >pir\|A49431\|A49431 TGF-b superfamily | | | | | | |
| | | receptor type I - human | | | | | | |
| | | >sp\|P37023\|KIR3_HUMAN | | | | | | |
| | | SERINE/THREONINE-PROTEIN KINASE | | | | | | |
| | | RECEPTOR R3 PRECURSOR (EC 2.7.1.3 | | | | | | |
| 58 | 652557 | GLI-Krupple related protein [Homo sapiens] | gi\|186768 | 3 | 1064 | 92 | 92 | HBMVZ88 |
| | | >pir\|A40350\|A40350 transcription repressor protein | | | | | | |
| | | YY1 - human Length = 414 | | | | | | |
| 59 | 653011 | | | 409 | 651 | | | HRADN49 |
| 60 | 656155 | | | 57 | 233 | | | HL1AR11 |
| 61 | 656930 | (AF068836) cytohesin binding protein HE [Homo | gi\|3192909 | 88 | 840 | 93 | 93 | HTXFS01 |
| | | sapiens] >sp\|O60759\|O60759 CYTOHESIN | | | | | | |
| | | BINDING PROTEIN HE. Length = 359 | | | | | | |
| 62 | 659023 | | | 2 | 337 | | | HRDBI73 |
| 63 | 659263 | | | 98 | 412 | | | HSICM51 |
| 64 | 660696 | alpha-1 type IV collagen [Homo sapiens] | gi\|180803 | 1 | 1218 | 100 | 100 | HSLFT56 |
| | | >pir\|S16876\|CGHU4B collagen alpha 1(IV) chain | | | | | | |
| | | precursor - human >sp\|P02462\|CA14_HUMAN | | | | | | |
| | | PROCOLLAGEN ALPHA 1(IV) CHAIN | | | | | | |
| | | PRECURSOR. >gi\|180424 pro-alpha-1(IV) [Homo | | | | | | |
| | | sapiens] {SUB 1256-1669} >gi\|180818 procollagen | | | | | | |
| | | alpha-1 | | | | | | |
| 65 | 666881 | (AC002073) Lim Kinase [Homo sapiens] | gi\|2078472 | 101 | 373 | 100 | 100 | HOECM70 |
| | | >gnl\|PID\|d1008908 LIMK-2 [Homo sapiens] | | | | | | |
| | | >sp\|P53671\|LIK2_HUMAN LIM DOMAIN | | | | | | |
| | | KINASE 2 (EC 2.7.1.-) (LIMK-2). | | | | | | |
| | | >pir\|PC4291\|PC4291 LIMK2a protein - human | | | | | | |
| | | (fragment) {SUB 1-80} Length = 638 | | | | | | |
| 66 | 677071 | | | 492 | 713 | | | HODDC39 |
| 67 | 677997 | | | 23 | 163 | | | HAPMF55 |
| 68 | 681507 | hepatoma-derived GF [Homo sapiens] | gnl\|PID\|d1004419 | 1 | 738 | 80 | 80 | HOEFV86 |
| | | >pir\|A55055\|A55055 hepatoma-derived growth | | | | | | |
| | | factor - human >sp\|P51858\|HDGF_HUMAN | | | | | | |
| | | HEPATOMA-DERIVED GROWTH FACTOR | | | | | | |
| | | (HDGF). Length = 240 | | | | | | |
| 69 | 682736 | selenophosphate synthetase 2 [Homo sapiens] | gi\|1815622 | 109 | 858 | 100 | 100 | HGBAS11 |
| | | >sp\|Q99611\|Q99611 SELENOPHOSPHATE | | | | | | |
| | | SYNTHETASE 2. Length = 448 | | | | | | |
| 70 | 683116 | rsec8 [Rattus norvegicus] >pir\|I59422\|I59422 rsec8 - | gi\|1019441 | 93 | 1346 | 94 | 96 | HMSCX18 |
| | | rat (fragment) >sp\|Q62824\|Q62824 RSEC8 | | | | | | |
| | | (FRAGMENT). Length = 975 | | | | | | |
| 71 | 686494 | | | 797 | 979 | | | HKIYK88 |
| 72 | 686634 | HLA DP4 beta-chain [Homo sapiens] >gi\|296648 | gi\|306858 | 325 | 867 | 97 | 97 | HAJBM85 |
| | | pot. hla-dp-beta 1 [Homo sapiens] | | | | | | |
| | | >pir\|A02229\|HLHUPB MHC class II | | | | | | |
| | | histocompatibility antigen HLA-DP beta 1 chain | | | | | | |
| | | (allele DPB4.1) precursor - human | | | | | | |
| | | >sp\|P04440\|HB2P_HUMAN HLA CLASS II | | | | | | |
| | | HISTOCOMPATIBILITY ANTIGEN, | | | | | | |
| 73 | 688221 | (AF033095) testis enhanced gene transcript protein | gi\|2645729 | 60 | 824 | 78 | 78 | HCYBK57 |
| | | [Homo sapiens] Length = 237 | | | | | | |
| 74 | 703498 | MacMARCKS gene product [Homo sapiens] | gi\|38435 | 27 | 767 | 67 | 67 | HNTSA18 |
| | | >pir\|S31861\|S31861 myristylated alanine-rich | | | | | | |
| | | protein kinase C substrate, macrophage - human | | | | | | |
| | | >sp\|P49006\|MRP_HUMAN MARCKS-RELATED | | | | | | |
| | | PROTEIN (MAC-MARCKS). {SUB 2-195} | | | | | | |
| | | Length = 195 | | | | | | |
| 75 | 705143 | collagen alpha 2(IV) chain precursor - human | pir\|A32024\|CGHU2B | 1056 | 2345 | 100 | 100 | HLDCU68 |
| | | >sp\|P08572\|CA24_HUMAN PROCOLLAGEN | | | | | | |
| | | ALPHA 2(IV) CHAIN PRECURSOR. >gi\|29551 | | | | | | |
| | | alpha (2) chain [Homo sapiens] {SUB 1254-1712} | | | | | | |
| | | >gi\|553233 alpha-2 type IV collagen [Homo | | | | | | |
| | | sapiens] {SUB 1-33} Length = 1712 | | | | | | |
| 76 | 705227 | | | 1185 | 1388 | | | HAJBQ62 |
| 77 | 705958 | pulmonary surfactant-associated protein SP-B | gi\|190674 | 1 | 291 | 97 | 97 | HAPSA56 |
| | | [Homo sapiens] Length = 381 | | | | | | |
| 78 | 705965 | | | 371 | 727 | | | HHFGD34 |
| 79 | 706145 | proteasome subunit LMP7 [Homo sapiens] | gi\|38482 | 2 | 787 | 99 | 99 | HELFV83 |
| | | >gi\|1054747 alternative first exon (1b) [Homo | | | | | | |
| | | sapiens] >pir\|C44324\|C44324 proteasome chain | | | | | | |
| | | LMP7, form E2 precursor - human Length = 276 | | | | | | |
| 80 | 706473 | | | 605 | 934 | | | HT3BL17 |
| 81 | 707380 | | | 2 | 160 | | | HOSCI74 |
| 82 | 707779 | ubiquitin-conjugating enzyme [Homo sapiens] | gi\|1172224 | 2 | 616 | 100 | 100 | HOUGS29 |
| | | >gnl\|PID\|e228278 ubiquitin conjugating enzyme | | | | | | |
| | | [Homo sapiens] >gi\|1184055 ubiquitin conjugating | | | | | | |
| | | enzyme homolog [Homo sapiens] >gi\|1574950 | | | | | | |
| | | RAD6 homolog; May be involved in ubiquitin | | | | | | |
| | | conjugation; Interacts with RAD | | | | | | |
| 83 | 709441 | c-syn protooncogene [Homo sapiens] | gi\|181172 | 3 | 272 | 96 | 96 | HPFCC93 |
| | | >pir\|A24314\|TVHUSY protein-tyrosine kinase (EC | | | | | | |
| | | 2.7.1.112) fyn, splice form B - human | | | | | | |
| | | >sp\|P06241\|FYN_HUMAN PROTO-ONCOGENE | | | | | | |
| | | TYROSINE-PROTEIN KINASE FYN (EC | | | | | | |
| | | 2.7.1.112) (P59-FYN) (SYN) (SLK). {SUB 2-537} | | | | | | |
| | | Length = 537 | | | | | | |
| 84 | 710443 | adenylyl cyclase-associated protein [Homo sapiens] | gi\|178084 | 124 | 1560 | 100 | 100 | HUSAK67 |
| | | >gi\|179920 CAP protein [Homo sapiens] | | | | | | |
| | | >pir\|A48120\|A48120 adenylyl cyclase-associated | | | | | | |
| | | CAP protein homolog - human | | | | | | |
| | | >sp\|Q01518\|CAP1_HUMAN ADENYLYL | | | | | | |
| | | CYCLASE-ASSOCIATED PROTEIN 1 (CAP 1). | | | | | | |
| | | Length = 475 | | | | | | |
| 85 | 710603 | | | 285 | 2099 | | | HCLCA40 |
| 86 | 710616 | tissue-specific secretory protein [unidentified] | gi\|513467 | 13 | 549 | 90 | 90 | HLJBI80 |
| | | >gi\|818881 epididymal secretory protein precursor | | | | | | |
| | | [Pan troglodytes] >gi\|794071 epididymal secretory | | | | | | |
| | | protein 14.6 [Macaca fascicularis] >gi\|37477 orf | | | | | | |
| | | [Homo sapiens] >pir\|I53929\|I53929 epididymal | | | | | | |
| | | secretory pr | | | | | | |
| 87 | 710662 | | | 29 | 532 | | | HFIHJ06 |
| 88 | 710917 | binding protein [Homo sapiens] | gi\|553204 | 68 | 2182 | 87 | 87 | HTPCV69 |
| | | >sp\|Q13861\|Q13861 DNA-BINDING PROTEIN | | | | | | |
| | | (FRAGMENT). Length = 695 | | | | | | |
| 89 | 711866 | | | 199 | 444 | | | HAPSN41 |
| 90 | 714903 | JAK1 protein = protein tyrosine kinase [mice, eye, | bbs\|135032 | 43 | 891 | 92 | 93 | HMCHM89 |
| | | Peptide, 1153 aa] [Mus sp.] Length = 1153 | | | | | | |
| 91 | 718139 | rab 13 [Homo sapiens] >pir\|A49647\|A49647 GTP- | gi\|452320 | 3 | 740 | 100 | 100 | HMSBB73 |
| | | binding protein Rab13 - human Length = 203 | | | | | | |
| 92 | 719142 | | | 489 | 1316 | | | HHSEA46 |
| 93 | 719721 | | | 308 | 523 | | | HHBAG83 |
| 94 | 719914 | Fif gene product [Mus musculus] >gi\|1067145 FT1 | gi\|311632 | 317 | 1039 | 95 | 97 | HLICC89 |
| | | protein [Mus musculus] >pir\|S33513\|S33513 gene | | | | | | |
| | | Fif protein - mouse >sp\|Q64362\|Q64362 FUSED | | | | | | |
| | | TOES (FT1 PROTEIN), Length = 292 | | | | | | |
| 95 | 720134 | | | 328 | 468 | | | HISBE47 |
| 96 | 720270 | | | 646 | 867 | | | HCLCX62 |
| 97 | 720583 | caveolin [Homo sapiens] >pir\|S26884\|S26884 | gi\|38516 | 47 | 631 | 98 | 98 | HSKWA34 |
| | | caveolin - human >sp\|Q03135\|CAV1_HUMAN | | | | | | |
| | | CAVEOLIN-1. Length = 178 | | | | | | |
| 98 | 720904 | cDNA isolated for this protein using a monoclonal | gnl\|PID\|e103161 | 160 | 858 | 100 | 100 | HLTDL48 |
| | | antibody directed against the p27k prosomal protein | | | | | | |
| | | [Homo sapiens] Length = 266 | | | | | | |
| 99 | 721194 | | | 564 | 1268 | | | HEMDK30 |
| 100 | 721271 | | | 923 | 1141 | | | HAPOO33 |
| 101 | 723886 | | | 280 | 585 | | | HMELQ32 |
| 102 | 723968 | cytochrome c oxidase subunit VIb (AA 1-86) | gi\|30295 | 64 | 408 | 100 | 100 | HLDXB30 |
| | | [Homo sapiens] >gi\|30381 cytochrome oxidase | | | | | | |
| | | subunit VIb [Homo sapiens] >gi\|2098574 | | | | | | |
| | | (AC002115) COXG [Homo sapiens] | | | | | | |
| | | >pir\|S03287\|OGHU6B cytochrome- | | | | | | |
| | | c oxidase (EC 1.9.3.1) chain VIb - human | | | | | | |
| | | >sp\|P14854\|COXG_HUMAN CYTOC | | | | | | |
| 103 | 725321 | | | 2 | 337 | | | HUKER20 |
| 104 | 725326 | DNA-binding protein [Homo sapiens] | gi\|2275153 | 3 | 665 | 94 | 94 | HTXKL35 |
| | | >sp\|E331113\|E331113 DNA-BINDING PROTEIN. | | | | | | |
| | | >sp\|G2275153\|G2275153 DNA-BINDING | | | | | | |
| | | PROTEIN. Length = 426 | | | | | | |
| 105 | 726034 | FIBRONECTIN PRECURSOR (FN). >gi\|182697 | sp\|P02751\|FINC_HU | 175 | 867 | 98 | 98 | HSLBF52 |
| | | fibronectin [Homo sapiens] {SUB 1594-2386} | MAN | | | | | |
| | | >gi\|4096852 fibronectin [Homo sapiens] {SUB | | | | | | |
| | | 1116-1422 } >gi\|4096850 fibronectin [Homo | | | | | | |
| | | sapiens] {SUB 2228-2386} >gi\|4096858 | | | | | | |
| | | fibronectin [Homo sapiens] {SUB 2231-2386} | | | | | | |
| | | >gi\|1826 | | | | | | |
| 106 | 726602 | | | 2 | 247 | | | HAPNN47 |
| 107 | 726965 | | | 882 | 1220 | | | HBKDL66 |
| 108 | 727809 | Na,K-ATPase beta subunit [Homo sapiens] | gi\|386974 | 103 | 1017 | 95 | 95 | HEBGA63 |
| | | >gi\|28933 put. Na/K-ATPase beta (aa 1-303) [Homo | | | | | | |
| | | sapiens] >pir\|A23764\|PWHUNB Na+/K+- | | | | | | |
| | | exchanging ATPase (EC 3.6.1.37) beta chain - | | | | | | |
| | | human >sp\|P05026\|ATNB_HUMAN | | | | | | |
| | | SODIUM/POTASSIUM-TRANSPORTING | | | | | | |
| | | ATPASE BETA-1 CHAIN (EC 3.6. | | | | | | |
| 109 | 731703 | | | 106 | 423 | | | HTTEM33 |
| 110 | 732840 | (AB019219) similar to yeast pre-mRNA splicing | gnl\|PID\|d1038129 | 752 | 1456 | 100 | 100 | HEONN38 |
| | | factors, Prp1/Zer1 and Prp6 [Homo sapiens] | | | | | | |
| | | Length = 941 | | | | | | |
| 111 | 733629 | | | 320 | 502 | | | HERAL56 |
| 112 | 733749 | hevin gene product [Homo sapiens] | gi\|758066 | 221 | 2272 | 86 | 86 | HNTNI08 |
| | | >pir\|S60062\|S60062 hevin precursor - human | | | | | | |
| | | >sp\|Q14515\|Q14515 HIGH ENDOTHELIAL | | | | | | |
| | | VENULE PRECURSOR. Length = 664 | | | | | | |
| 113 | 734119 | | | 1440 | 1622 | | | HWADN83 |
| 114 | 734637 | transfer RNA-Trp synthetase [Homo sapiens] | gi\|340368 | 324 | 749 | 93 | 95 | HTXEJ03 |
| | | >pir\|JH0533\|JH0533 tryptophan--tRNA ligase (EC | | | | | | |
| | | 6.1.1.2) - human Length = 471 | | | | | | |
| 115 | 734638 | transfer RNA-Trp synthetase [Homo sapiens] | gi\|184657 | 511 | 1935 | 100 | 100 | HMEJM56 |
| | | >gi\|30821 471 aa polypeptide (gamma2) [Homo | | | | | | |
| | | sapiens] >pir\|A41633\|A41706 tryptophan--tRNA | | | | | | |
| | | ligase (EC 6.1.1.2) - human >bbs\|179357 | | | | | | |
| | | tryptophanyl-tRNA synthetase, TrpRS {N-terminal, | | | | | | |
| | | alternatively spliced} {EC 6.1.1.2 | | | | | | |
| 116 | 734865 | CAG-isl 7 [Homo sapiens] Length = 213 | gi\|3126984 | 1 | 795 | 89 | 89 | HEGAJ73 |
| 117 | 738846 | | | 234 | 356 | | | HAPOQ59 |
| 118 | 740584 | | | 103 | 246 | | | HBMUW84 |
| 119 | 741213 | (AF071559) histone deacetylase dHDAC3 | gi\|3982757 | 3 | 506 | 43 | 72 | HAPNP64 |
| | | [Drosophila melanogaster] | | | | | | |
| | | >sp\|G3982757\|G3982757 | | | | | | |
| | | HISTONE DEACETYLASE DHDAC3. Length = | | | | | | |
| | | 438 | | | | | | |
| 120 | 741229 | unnamed protein product [Homo sapiens] | gnl\|PID\|e306342 | 60 | 1115 | 94 | 94 | HWLEG61 |
| | | >gi\|903934 cysteine protease [Homo sapiens] | | | | | | |
| | | >gi\|886050 Ich-2 [Homo sapiens] >gi\|999454 TX | | | | | | |
| | | protease precursor [Homo sapiens] >gi\|4096346 | | | | | | |
| | | Mih1/TX isoform alpha [Homo sapiens] | | | | | | |
| | | >pir\|A57511\|A57511 interleukin-1 | | | | | | |
| | | beta conve | | | | | | |
| 121 | 741299 | (AJ010952) putative tRNA splicing protein [Homo | gnl\|PID\|e1321525 | 2 | 955 | 100 | 100 | HOEEY69 |
| | | sapiens] >sp\|E1321525\|E1321525 PUTATIVE | | | | | | |
| | | TRNA SPLICING PROTEIN (FRAGMENT). | | | | | | |
| | | Length = 318 | | | | | | |
| 122 | 743134 | P47 LBC oncogene [Homo sapiens] | gi\|458210 | 1 | 1254 | 99 | 99 | HAMGO15 |
| | | >pir\|I38434\|I38434 P47 LBC oncogene - human | | | | | | |
| | | >sp\|Q12802\|Q12802 P47 LBC ONCOGENE. | | | | | | |
| | | Length = 424 | | | | | | |
| 123 | 744680 | IGF-BP 4 [Homo sapiens] >gnl\|PID\|e1227579 | gi\|184816 | 379 | 747 | 99 | 99 | HUSGU74 |
| | | insulin-like growth factor binding protein 4 [Homo | | | | | | |
| | | sapiens] >pir\|B37252\|B37252 insulin-like growth | | | | | | |
| | | factor-binding protein 4 precursor - human | | | | | | |
| | | >sp\|P22692\|IBP4_HUMAN INSULIN-LIKE | | | | | | |
| | | GROWTH FACTOR BINDING PROTEIN 4 PREC | | | | | | |
| 124 | 744705 | | | 69 | 983 | | | HPMGT42 |
| 125 | 745337 | protein phosphatase 2A 65 kDa regulatory subunit, | gi\|510469 | 50 | 1837 | 99 | 100 | HADDU62 |
| | | alpha isoform [Sus scrofa] >sp\|P54612\|2AAA_PIG | | | | | | |
| | | PROTEIN PHOSPHATASE PP2A, 65 KD | | | | | | |
| | | REGULATORY SUBUNIT, ALPHA ISOFORM | | | | | | |
| | | (PROTEIN PHOSPHATASE PP2A SUBUNIT A, | | | | | | |
| | | ALPHA ISOFORM) (PR65-ALPHA). {SUB 2-589} | | | | | | |
| | | Length = 589 | | | | | | |
| 126 | 745570 | | | 1044 | 1322 | | | HMQBY61 |
| 127 | 746078 | | | 25 | 201 | | | HAGGV41 |
| 128 | 750595 | | | 666 | 1061 | | | HE8PW74 |
| 129 | 750633 | | | 768 | 1202 | | | HAUBK02 |
| 130 | 750766 | CLE7 [Gallus gallus] Length = 239 | gi\|1184955 | 1 | 858 | 83 | 90 | HE8PS92 |
| 131 | 752225 | | | 238 | 426 | | | HLWFK49 |
| 132 | 754538 | | | 1 | 567 | | | HAPST69 |
| 133 | 754820 | apolipoprotein E [Homo sapiens] Length = 317 | gi\|178853 | 103 | 561 | 100 | 100 | HLDAR05 |
| 134 | 756565 | GTP-binding protein (rab5) [Canis familiaris] | gi\|164056 | 78 | 221 | 79 | 90 | HOSCN57 |
| | | >pir\|A30413\|A30413 GTP-binding protein Rab5- | | | | | | |
| | | dog Length = 215 | | | | | | |
| 135 | 756793 | | | 1603 | 1896 | | | HCRAB31 |
| 136 | 757431 | (AF021819) RNA-binding protein regulatory | gi\|2460318 | 145 | 726 | 100 | 100 | HSAYH89 |
| | | subunit [Homo sapiens] >sp\|O14805\|O14805 RNA- | | | | | | |
| | | BINDING PROTEIN REGULATORY SUBUNIT. | | | | | | |
| | | Length = 189 | | | | | | |
| 137 | 757478 | | | 3 | 578 | | | HTWDN75 |
| 138 | 757695 | | | 636 | 971 | | | HISAG86 |
| 139 | 760876 | | | 1 | 240 | | | HCLCO72 |
| 140 | 761528 | fructose 1,6-bisphosphatase (EC 3.1.3.11) [Homo | gi\|178349 | 2 | 1273 | 96 | 96 | HSICU72 |
| | | sapiens] >gnl\|PID\|d1005592 ‘fructose-1,6- | | | | | | |
| | | bisphosphatase’ [Homo sapiens] >gnl\|PID\|d1005593 | | | | | | |
| | | ‘fructose-1,6-bisphosphatase’ [Homo sapiens] | | | | | | |
| | | >gnl\|PID\|d1005594 ‘fructose-1,6-bisphosphatase’ | | | | | | |
| | | [Homo sapiens] >sp | | | | | | |
| 141 | 761936 | | | 454 | 645 | | | HAFBF11 |
| 142 | 761944 | homologue of yeast IPP isomerase [Homo sapiens] | gi\|488750 | 1342 | 1923 | 94 | 94 | H6EEL27 |
| | | >pir\|A53028\|A53028 isopentenyl-diphosphate Delta- | | | | | | |
| | | isomerase (EC 5.3.3.2) homolog - human | | | | | | |
| | | >sp\|Q13907\|Q13907 HOMOLOG OF YEAST IPP | | | | | | |
| | | ISOMERASE. Length = 228 | | | | | | |
| 143 | 764913 | keratinocyte growth factor 2 [Homo sapiens] | gi\|2231295 | 486 | 1214 | 89 | 89 | HOEFN72 |
| | | >gnl\|PID\|d1023194 (AB002097) FGF-10 [Homo | | | | | | |
| | | sapiens] >sp\|O15520\|O15520 FIBROBLAST | | | | | | |
| | | GROWTH FACTOR-10. Length = 208 | | | | | | |
| 144 | 764941 | ras inhibitor [Homo sapiens] >pir\|C38637\|C38637 | gi\|553634 | 672 | 1769 | 97 | 99 | HDPQI77 |
| | | Ras inhibitor (clone JC310) - human (fragment) | | | | | | |
| | | >sp\|Q00426\|Q00426 PUTATIVE RAS INHIBITOR | | | | | | |
| | | (FRAGMENT). Length = 428 | | | | | | |
| 145 | 765903 | | | 766 | 1092 | | | HOSCZ81 |
| 146 | 766122 | | | 3 | 224 | | | HAPST63 |
| 147 | 766719 | | | 448 | 822 | | | HFASM02 |
| 148 | 767655 | Sec62 [Homo sapiens] >gnl\|PID\|d1013944 | gi\|1928973 | 86 | 1162 | 100 | 100 | HCUCC76 |
| | | translocation protein-1 [Homo sapiens] | | | | | | |
| | | >pir\|JC5279\|JC5279 translocation protein 1 - human | | | | | | |
| | | >sp\|Q99442\|Q99442 TRANSLOCATIONAL | | | | | | |
| | | PROTEIN-1. Length 399 | | | | | | |
| 149 | 767941 | HPBRII-7 gene product [Homo sapiens] >gi\|871299 | gi\|871301 | 2 | 334 | 68 | 85 | HTGDX23 |
| | | Human pre-mRNA cleavage factor I68 kDa subunit | | | | | | |
| | | [Homo sapiens] >pir\|S57447\|S57447 HPBRII-7 | | | | | | |
| | | protein - human >sp\|Q16630\|Q16630 HPBRII-4 | | | | | | |
| | | MRNA. Length = 551 | | | | | | |
| 150 | 768035 | | | 170 | 655 | | | HHFCX49 |
| 151 | 769888 | 5C5. Length = 276 | sp\|Q15693\|Q15693 | 106 | 690 | 82 | 82 | HGBCO73 |
| 152 | 771671 | complement C1q B-chain precursor [Homo sapiens] | gi\|179642 | 594 | 890 | 98 | 100 | HDPAK07 |
| | | >pir\|B23422\|C1HUQB complement subcomponent | | | | | | |
| | | C1q chain B precursor - human {SUB 3-255} | | | | | | |
| | | >sp\|P02746\|C1QB_HUMAN COMPLEMENT C1Q | | | | | | |
| | | SUBCOMPONENT, B CHAIN PRECURSOR. | | | | | | |
| | | {SUB 5-255} >gi\|573114 C1q B-chain precursor | | | | | | |
| | | [Homo s | | | | | | |
| 153 | 772876 | | | 59 | 820 | | | HUSIR49 |
| 154 | 773150 | dJ262D12.2 ((mitochondrial/chloroplast 30S | gnl\|PID\|e1284377 | 145 | 489 | 99 | 99 | HDLAB47 |
| | | ribosomal protein S14)-LIKE protein) [Homo | | | | | | |
| | | sapiens] >sp\|O60783\|O60783 DJ262D12.2 | | | | | | |
| | | ((MITOCHONDRIAL/CHLOROPLAST 30S | | | | | | |
| | | RIBOSOMAL PROTEIN S14)-LIKE PROTEIN). | | | | | | |
| | | Length = 128 | | | | | | |
| 155 | 773398 | | | 699 | 995 | | | HAFBD20 |
| 156 | 773647 | (AF089816) RGS-GAIP interacting protein GIPC | gi\|3789934 | 501 | 953 | 90 | 90 | HWLFD70 |
| | | [Homo sapiens] >sp\|G3789934\|G3789934 RGS- | | | | | | |
| | | GAIP INTERACTING PROTEIN GIPC. | | | | | | |
| | | >gi\|2613004 (AF028824) Tax interaction protein 2 | | | | | | |
| | | [Homo sapiens] {SUB 78-333} Length = 333 | | | | | | |
| 157 | 773927 | splicing factor [Homo sapiens] >gi\|472956 gCIq-R | gi\|338045 | 1 | 945 | 100 | 100 | HCHME48 |
| | | [Homo sapiens] >pir\|JT0762\|JT0762 pre-mRNA | | | | | | |
| | | splicing factor SF2 P32 chain precursor - human | | | | | | |
| | | >sp\|Q07021\|MA32_HUMAN COMPLEMENT | | | | | | |
| | | COMPONENT 1, Q SUBCOMPONENT BINDING | | | | | | |
| | | PROTEIN PRECURSOR (GLYCOPROTEIN | | | | | | |
| | | GC1QBP) (GC1Q- | | | | | | |
| 158 | 774100 | (AF006088) p16-Arc [Homo sapiens] >gi\|2407611 | gi\|2282042 | 97 | 597 | 100 | 100 | HGCNL45 |
| | | (AF017807) Arp2/3 complex 16kDa subunit [Homo | | | | | | |
| | | sapiens] >sp\|O15511\|AR16_HUMAN ARP2/3 | | | | | | |
| | | COMPLEX 16 KD SUBUNIT (P16-ARC). | | | | | | |
| | | Length = 151 | | | | | | |
| 159 | 774101 | | | 120 | 353 | | | HMVCT79 |
| 160 | 774159 | | | 1 | 141 | | | HKAEV15 |
| 161 | 774341 | | | 2 | 682 | | | HMAFC46 |
| 162 | 774371 | | | 1291 | 1647 | | | HHFHK22 |
| 163 | 777534 | (AF006082) Arp2 [Homo sapiens] | gi\|2282030 | 148 | 1365 | 96 | 96 | HMTAE25 |
| | | >sp\|O15142\|ARP2_HUMAN ACTIN-LIKE | | | | | | |
| | | PROTEIN 2. Length = 394 | | | | | | |
| 164 | 777623 | (AF030162) inner mitochondrial membrane | gi\|2599129 | 98 | 760 | 86 | 86 | HMELH12 |
| | | translocase Tim23 [Homo sapiens] | | | | | | |
| | | >sp\|O14925\|O14925 INNER MITOCHONDRIAL | | | | | | |
| | | MEMBRANE TRANSLOCASE TIM23. Length = | | | | | | |
| | | 209 | | | | | | |
| 165 | 779194 | | | 2 | 232 | | | HODFE80 |
| 166 | 779387 | SSR alpha subunit [Homo sapiens] | gi\|551638 | 138 | 1028 | 84 | 84 | HNTNA20 |
| | | >pir\|I38246\|I38246 SSR alpha subunit - human | | | | | | |
| | | Length = 286 | | | | | | |
| 167 | 779790 | | | 3 | 488 | | | HMTAE54 |
| 168 | 779818 | human complement C1r [Homo sapiens] | gi\|179644 | 73 | 1125 | 98 | 99 | HLICR27 |
| | | >pir\|A24170\|C1HURB complement subcomponent | | | | | | |
| | | C1r (EC 3.4.21.41) precursor - human | | | | | | |
| | | >sp\|P00736\|C1R_HUMAN COMPLEMENT C1R | | | | | | |
| | | COMPONENT PRECURSOR (BC 3.4.21.41). | | | | | | |
| | | Length = 705 | | | | | | |
| 169 | 779819 | human complement C1r [Homo sapiens] | gi\|179644 | 370 | 1716 | 99 | 99 | HIBEI12 |
| | | >pir\|A24170\|C1HURB complement subcomponent | | | | | | |
| | | C1r (EC 3.4.21.41) precursor - human | | | | | | |
| | | >sp\|P00736\|C1R_HUMAN COMPLEMENT C1R | | | | | | |
| | | COMPONENT PRECURSOR (EC 3.4.21.41). | | | | | | |
| | | Length = 705 | | | | | | |
| 170 | 780634 | Man9-mannosidase [Homo sapiens] | gi\|416180 | 3 | 281 | 97 | 97 | HLTGU89 |
| | | >pir\|S38965\|S38965 Man(9)-mannosidase - human | | | | | | |
| | | >sp\|P33908\|MA12_HUMAN MANNOSYL- | | | | | | |
| | | OLIGOSACCHARIDE ALPHA-1,2- | | | | | | |
| | | MANNOSIDASE (EC 3.2.1.113) (MAN(9)- | | | | | | |
| | | ALPHA-MANNOSIDASE). Length = 625 | | | | | | |
| 171 | 780638 | (AF049659) geranylgeranyl pyrophosphate synthase | gi\|2944400 | 209 | 1120 | 58 | 76 | HDQER43 |
| | | [Drosophila melanogaster] >sp\|O61539\|O61539 | | | | | | |
| | | GERANYLGERANYL PYROPHOSPHATE | | | | | | |
| | | SYNTHASE. Length = 338 | | | | | | |
| 172 | 780773 | (AC004079) 40% similar to yeast high mobility | gi\|2822179 | 43 | 555 | 91 | 94 | HBJHV91 |
| | | group-like nuclear protein, P32495 (PID:g417360) | | | | | | |
| | | [Homo sapiens] >sp\|O43362\|O43362 SIMILAR TO | | | | | | |
| | | YEAST HIGH MOBILITY GROUP-LIKE | | | | | | |
| | | NUCLEAR PROTEIN. Length = 151 | | | | | | |
| 173 | 780778 | transcription factor LBP1a - human Length = 504 | pir\|A56205\|A56205 | 3 | 167 | 100 | 100 | HE8TZ19 |
| 174 | 780873 | DAD1 protein [Sus scrofa] >sp\|Q29036\|DAD1_PIG | gnl\|PID\|d1013802 | 1 | 429 | 87 | 87 | HEDAE01 |
| | | DEFENDER AGAINST CELL DEATH 1 (DAD-1). | | | | | | |
| | | Length = 113 | | | | | | |
| 175 | 782113 | (AF039704) lysosomal pepstatin insensitive protease | gi\|4063841 | 575 | 1702 | 92 | 92 | HWBEE06 |
| | | [Homo sapiens] >sp\|G4063841\|G4063841 | | | | | | |
| | | LYSOSOMAL PEPSTATIN INSENSITIVE | | | | | | |
| | | PROTEASE. Length = 563 | | | | | | |
| 176 | 782153 | Mvplp [Saccharomyces cerevisiae] Length = 511 | gi\|562121 | 133 | 855 | 39 | 72 | HDABR21 |
| 177 | 782376 | similar to ubiquitin conjugating enzyme | gi\|746510 | 100 | 1014 | 62 | 79 | HFXBY84 |
| | | [Caenorhabditis elegans] >sp\|Q18931\|Q18931 | | | | | | |
| | | SIMILAR TO UBIQUITIN CONJUGATING | | | | | | |
| | | ENZYME. Length = 309 | | | | | | |
| 178 | 782420 | leptin receptor gene-related protein [Homo sapiens] | gnl\|PID\|e315497 | 1 | 480 | 100 | 100 | HSKHA38 |
| | | >sp\|O15243\|O15243 OB-R GENE RELATED | | | | | | |
| | | PROTEIN. Length = 131 | | | | | | |
| 179 | 782672 | | | 3 | 380 | | | HOSAW38 |
| 180 | 783148 | | | 3 | 326 | | | HBIBU44 |
| 181 | 783510 | (AJ000644) SPOP [Homo sapiens] | gnl\|PID\|e1216712 | 165 | 1319 | 95 | 95 | HCGBC59 |
| | | >sp\|O43791\|O43791 SPOP. Length = 374 | | | | | | |
| 182 | 783734 | mena protein [Mus musculus] >sp\|P70430\|P70430 | gi\|1644455 | 2 | 1171 | 81 | 84 | HOHAH70 |
| | | ENABLED HOMOLOG (MENA PROTEIN). | | | | | | |
| | | Length = 541 | | | | | | |
| 183 | 784201 | (AF073839) bithoraxoid-like protein [Rattus | gi\|3288881 | 64 | 477 | 93 | 96 | HWHGB85 |
| | | norvegicus] >sp\|O88567\|O88567 BITHORAXOID- | | | | | | |
| | | LIKE PROTEIN. Length = 96 | | | | | | |
| 184 | 784381 | tetracycline transporter-like protein [Mus musculus] | dbj\|\|D88315_1 | 3 | 1409 | 78 | 84 | HDQFG33 |
| | | >pir\|JC564\|JC5641 sugar transporter protein | | | | | | |
| | | HiAT1 - mouse >sp\|P70187\|P70187 | | | | | | |
| | | HIPPOCAMPUS ABUNDANT PROTEIN | | | | | | |
| | | TRANSCRIPT 1 (TETRACYCLINE | | | | | | |
| | | TRANSPORTER-LIKE PROTEIN). Length = 490 | | | | | | |
| 185 | 784387 | | | 2 | 472 | | | HWBEJ50 |
| 186 | 784639 | GTP-binding protein (rab7) [Canis familiaris] | gi\|164058 | 88 | 711 | 100 | 100 | HE9RW49 |
| | | >pir\|B30413\|B30413 GTP-binding protein rab7 - | | | | | | |
| | | dog Length = 207 | | | | | | |
| 187 | 784641 | dJ560B9.3 [Homo sapiens] >sp\|O43735\|O43735 | gnl\|PID\|e1246376 | 120 | 596 | 67 | 81 | HDQEW56 |
| | | DJ560B9.3. Length = 152 | | | | | | |
| 188 | 785053 | | | 586 | 729 | | | HMSFN30 |
| 189 | 785142 | DOC-2 [Homo sapiens] >pir\|G02228\|G02228 DOC- | gi\|1063686 | 2 | 2038 | 90 | 90 | HOEBZ31 |
| | | 2 - human >sp\|P98082\|DOC2_HUMAN | | | | | | |
| | | DIFFERENTIALLY EXPRESSED PROTEIN 2 | | | | | | |
| | | (DOC-2). >gi\|1110539 mitogen-responsive | | | | | | |
| | | phosphoprotein [Homo sapiens] {SUB 1-229} | | | | | | |
| | | Length = 770 | | | | | | |
| 190 | 785584 | | | 18 | 524 | | | HT5FS84 |
| 191 | 785795 | ERF-1 gene product [Homo sapiens] | gi\|825653 | 12 | 1178 | 75 | 75 | HWAAY25 |
| | | >pir\|S34854\|S34854 epidermal growth factor- | | | | | | |
| | | response factor 1 - human >gi\|972116 ERF-1 protein | | | | | | |
| | | [Sus scrofa] {SUB 299-337} Length = 338 | | | | | | |
| 192 | 786283 | (AB016068) Hs Ste24p [Homo sapiens] | gnl\|PID\|d1034696 | 1 | 1020 | 88 | 88 | HOFMB15 |
| | | >sp\|O75844\|O75844 HS STE24P. Length = 475 | | | | | | |
| 193 | 786335 | HN1 [Mus musculus] >sp\|P97825\|P97825 | gi\|1864165 | 1 | 600 | 73 | 75 | HTLGW81 |
| | | HEMATOLOGICAL AND NEUROLOGICAL | | | | | | |
| | | EXPRESSED SEQUENCE 1 (HN1) (HN1). | | | | | | |
| | | Length = 154 | | | | | | |
| 194 | 786511 | | | 1 | 162 | | | HOSDD78 |
| 195 | 787330 | possesses similarity with C3HC4 type zinc finger | gnl\|PID\|e1343639 | 69 | 689 | 67 | 86 | HCWUG30 |
| | | domains [Caenorhabditis elegans] | | | | | | |
| | | >sp\|Q17573\|Q17573 C01G6.4 PROTEIN. Length = | | | | | | |
| | | 170 | | | | | | |
| 196 | 787377 | steroid receptor coactivator [Homo sapiens] | gi\|1117915 | 1 | 426 | 81 | 81 | HAPSS34 |
| | | >pir\|A57620\|A57620 steroid receptor coactivator 1 - | | | | | | |
| | | human >sp\|Q13420\|Q13420 STEROID RECEPTOR | | | | | | |
| | | COACTIVATOR. >pir\|PC4362\|PC4362 steroid | | | | | | |
| | | receptor coactivator-1 - human (fragment) {SUB | | | | | | |
| | | 990-1061} Length = 1061 | | | | | | |
| 197 | 787662 | | | 191 | 508 | | | HLHAU33 |
| 198 | 788754 | | | 143 | 2077 | | | HNTAQ63 |
| 199 | 789351 | (AB001993) glia maturation factor homologous | gnl\|PID\|d1026502 | 630 | 1070 | 99 | 99 | HNFIB05 |
| | | protein [Homo sapiens] >gi\|3329382 (AF038956) | | | | | | |
| | | glia maturation factor beta [Homo sapiens] | | | | | | |
| | | >sp\|O60234\|O60234 GLIA MATURATION | | | | | | |
| | | FACTOR HOMOLOGOUS PROTEIN. Length = | | | | | | |
| | | 142 | | | | | | |
| 200 | 789466 | | | 47 | 283 | | | HAPNZ91 |
| 201 | 790396 | | | 1 | 819 | | | HSKXJ34 |
| 202 | 791673 | | | 343 | 606 | | | HLTCB62 |
| 203 | 792080 | (AF037206) RING zinc finger protein [Mus | gi\|2746337 | 360 | 659 | 97 | 100 | HDQHN07 |
| | | musculus] >sp\|O54966\|O54966 RING ZINC | | | | | | |
| | | FINGER PROTEIN. Length = 268 | | | | | | |
| 204 | 793025 | protein-tyrosine phosphatase [Homo sapiens] | gi\|29981 | 835 | 1404 | 96 | 96 | HNFDF94 |
| | | >pir\|S29090\|S29090 dual specificity phosphoprotein | | | | | | |
| | | phosphatase (EC 3.1.3.-) 1 - human | | | | | | |
| | | >sp\|P28562\|DUS1_HUMAN DUAL SPECIFICITY | | | | | | |
| | | PROTEIN PHOSPHATASE 1 (EC 3.1.3.48) (EC | | | | | | |
| | | 3.1.3.16) (MAP KINASE PHOSPHATASE-1) | | | | | | |
| | | (MPK-1) ( | | | | | | |
| 205 | 793043 | (AF012872) phosphatidylinositol 4-kinase 230 | gi\|2326227 | 164 | 1183 | 99 | 99 | HEOMG90 |
| | | [Homo sapiens] >sp\|G2326227\|G2326227 | | | | | | |
| | | PHOSPHATIDYLINOSITOL 4-KINASE 230. | | | | | | |
| | | >gi\|598193 phosphatidylinositol 4-kinase [Homo | | | | | | |
| | | sapiens] {SUB 1191-2044} Length = 2044 | | | | | | |
| 206 | 793386 | | | 1 | 642 | | | HKABJ75 |
| 207 | 795144 | eIF3-p66 [Homo sapiens] >gi\|2351378 translation | gi\|2351378 | 2 | 1204 | 99 | 99 | HFOXO07 |
| | | initiation factor eIF3 p66 subunit [Homo sapiens] | | | | | | |
| | | >sp\|O15371\|O15371 EIF3-P66. Length = 548 | | | | | | |
| 208 | 795911 | | | 1323 | 1496 | | | HOGAN95 |
| 209 | 795962 | | | 145 | 777 | | | HOHAR44 |
| 210 | 796221 | glutathione-S-transferase homolog [Homo sapiens] | gi\|2393722 | 57 | 914 | 96 | 97 | HMAAC12 |
| | | >sp\|P78417\|P78417 GLUTATHIONE-S- | | | | | | |
| | | TRANSFERASE HOMOLOG. Length = 241 | | | | | | |
| 211 | 796283 | | | 443 | 718 | | | HFTBV21 |
| 212 | 796392 | | | 3 | 845 | | | HEEAO23 |
| 213 | 797655 | | | 3 | 776 | | | HKMMC49 |
| 214 | 799486 | anaphylatoxin C3a receptor [Homo sapiens] | gi\|1511644 | 144 | 1598 | 95 | 95 | HTAFD81 |
| | | Length = 482 | | | | | | |
| 215 | 799681 | | | 41 | 217 | | | HCLSC85 |
| 216 | 800221 | endothelial PAS domain protein 1 [Homo sapiens] | gi\|1805268 | 1 | 999 | 98 | 98 | HHPFS31 |
| | | Length = 870 | | | | | | |
| 217 | 800376 | ABC-C transporter [Homo sapiens] | gnl\|PID\|e243436 | 3 | 557 | 100 | 100 | HAPOJ91 |
| | | >pir\|S71363\|S71363 probable transport protein | | | | | | |
| | | ABC-C - human >sp\|Q92473\|Q92473 ABC-C | | | | | | |
| | | TRANSPORTER. Length = 1704 | | | | | | |
| 218 | 800567 | | | 1 | 1170 | | | HTXDX21 |
| 219 | 800652 | | | 2 | 745 | | | HMEFR61 |
| 220 | 800748 | (AF075575) dysferlin [Homo sapiens] | gi\|3600028 | 3 | 1850 | 66 | 83 | HDQGA13 |
| | | >sp\|O75923\|O75923 DYSFERLIN. Length = 2080 | | | | | | |
| 221 | 802032 | | | 153 | 560 | | | HPJCA43 |
| 222 | 802050 | glutathione peroxidase [Homo sapiens] | gnl\|PID\|e1192233 | 129 | 362 | 93 | 93 | HAOME95 |
| | | >gnl\|PID\|d1000980 glutathione peroxidase [Homo | | | | | | |
| | | sapiens] >sp\|O43787\|O43787 GLUTATHIONE | | | | | | |
| | | PEROXIDASE (EC 1.11.1.9). >gnl\|PID\|d1004380 | | | | | | |
| | | plasma glutathione peroxidase [Homo sapiens] | | | | | | |
| | | {SUB 82-226} >gnl\|PID\|d1004379 plasma glut | | | | | | |
| 223 | 805551 | (AF044201) neural membrane protein 35; NMP35 | gi\|3426268 | 118 | 1056 | 49 | 61 | HWHQN16 |
| | | [Rattus norvegicus] >sp\|O88407\|O88407 NEURAL | | | | | | |
| | | MEMBRANE PROTEIN 35. Length = 316 | | | | | | |
| 224 | 805662 | atopy related autoantigen CALC [Homo sapiens] | gnl\|PID\|e1310645 | 67 | 1527 | 99 | 99 | HAPTV32 |
| | | >sp\|O75785\|O75785 ATOPY RELATED | | | | | | |
| | | AUTOANTIGEN CALC (FRAGMENT). Length = | | | | | | |
| | | 313 | | | | | | |
| 225 | 805750 | | | 1 | 318 | | | HE9QJ13 |
| 226 | 805860 | | | 3 | 317 | | | HSSBJ90 |
| 227 | 805886 | (AF090386) napsin A [Homo sapiens] Length = 420 | gi\|4154287 | 186 | 1040 | 98 | 99 | HAPOP50 |
| 228 | 806706 | endothelial PAS domain protein 1 [Homo sapiens] | gi\|1805268 | 179 | 649 | 91 | 91 | HAHAA80 |
| | | Length = 870 | | | | | | |
| 229 | 811637 | (AF093414) estrogen response element binding | gi\|3747052 | 269 | 1189 | 88 | 88 | H6EDL02 |
| | | protein [Saguinus oedipus] >sp\|O77798\|O77798 | | | | | | |
| | | ESTROGEN RESPONSE ELEMENT BINDING | | | | | | |
| | | PROTEIN. >sp\|G386547\|G386547 D(TTAGGG)N- | | | | | | |
| | | BINDING PROTEIN B39 = TYPE E | | | | | | |
| | | HETEROGENEOUS NUCLEAR | | | | | | |
| | | RIBONUCLEOPROTEIN HOMOLOG {PEPTIDE | | | | | | |
| | | 2}. {SU | | | | | | |
| 230 | 811782 | (AF026124) schwannoma-associated protein [Mus | gi\|2565396 | 1012 | 1755 | 85 | 86 | HUSHH56 |
| | | musculus] >sp\|O35405\|O35405 SCHWANNOMA- | | | | | | |
| | | ASSOCIATED PROTEIN. Length = 488 | | | | | | |
| 231 | 812338 | p40 [Homo sapiens] >sp\|O00568\|O00568 RAB9 | gnl\|PID\|e323546 | 261 | 1169 | 96 | 96 | HAPTR06 |
| | | EFFECTOR P40, COMPLETE CDS. Length = 372 | | | | | | |
| 232 | 812439 | (AB008375) osteoblast specific cysteine-rich protein | gnl\|PID\|d1023870 | 617 | 1699 | 85 | 85 | HSLHL73 |
| | | [Homo sapiens] >sp\|O14549\|O14549 | | | | | | |
| | | OSTEOBLAST SPECIFIC CYSTEINE-RICH | | | | | | |
| | | PROTEIN. Length = 403 | | | | | | |
| 233 | 812645 | GDP dissociation inhibitor [Homo sapiens] | gi\|404045 | 1 | 462 | 96 | 97 | HAPNO29 |
| | | >gi\|441455 Human rho GDP-dissociation Inhibitor | | | | | | |
| | | 2(IEF 8120) [Homo sapiens] >pir\|A47742\|A47742 | | | | | | |
| | | Rho-GDP-dissociation inhibitor Ly-GDI - human | | | | | | |
| | | >sp\|P52566\|GDIS_HUMAN RHO GDP- | | | | | | |
| | | DISSOCIATION INHIBITOR 2 (RHO GDI 2) | | | | | | |
| | | (RHO-G | | | | | | |
| 234 | 812770 | tropomyosin, fibroblast - human >gi\|37424 | pir\|A25530\|A25530 | 26 | 835 | 79 | 79 | HWAAY56 |
| | | cytoskeletal tropomyosin (AA 1-248) [Homo | | | | | | |
| | | sapiens] {SUB 1-239) Length = 248 | | | | | | |
| 235 | 812893 | mitogen inducible gene mig-2 [Homo sapiens] | gi\|505033 | 176 | 2311 | 58 | 81 | HMAFL22 |
| | | >pir\|S69890\|S69890 mitogen inducible gene mig-2 - | | | | | | |
| | | human >sp\|Q14840\|Q14840 MITOGEN | | | | | | |
| | | INDUCIBLE GENE MIG-2 (FRAGMENT). | | | | | | |
| | | Length = 720 | | | | | | |
| 236 | 813080 | (AF052433) katanin p80 subunit [Strongylocentrotus | gi\|3005601 | 2 | 538 | 37 | 60 | HAPOV32 |
| | | purpuratus] >sp\|O61585\|O61585 KATANIN P80 | | | | | | |
| | | SUBUNIT. Length = 690 | | | | | | |
| 237 | 813139 | phosphoprotein p53 [Homo sapiens] | gi\|386994 | 337 | 1149 | 100 | 100 | HHEUB27 |
| | | >sp\|Q16811\|Q16811 CELLULAR TUMOR | | | | | | |
| | | ANTIGEN P53 (FRAGMENT). Length = 393 | | | | | | |
| 238 | 815326 | | | 1204 | 1320 | | | HDPRN26 |
| 239 | 815740 | | | 1243 | 1494 | | | HLTEI46 |
| 240 | 815812 | | | 852 | 1028 | | | HLTBF42 |
| 241 | 824865 | The hal520 gene product is novel. [Homo sapiens] | gnl\|PID\|d1008225 | 2 | 904 | 91 | 91 | HDPIH94 |
| | | >gi\|1255240 lysosomal-associated | | | | | | |
| | | multitransmembrane protein [Homo sapiens] {SUB | | | | | | |
| | | 8-269} Length = 269 | | | | | | |
| 242 | 825138 | | | 176 | 484 | | | HWLLC18 |
| 243 | 825535 | | | 2 | 736 | | | HELGU27 |
| 244 | 826203 | | | 1604 | 1903 | | | HL4AF72 |
| 245 | 827046 | | | 2477 | 2656 | | | HE8B156 |
| 246 | 827168 | (AF035819) macrophage receptor MARCO [Homo | gi\|3002791 | 87 | 1295 | 100 | 100 | HMSJA80 |
| | | sapiens] >sp\|G3002791\|G3002791 MACROPHAGE | | | | | | |
| | | RECEPTOR MARCO. Length = 520 | | | | | | |
| 247 | 827195 | collagen alpha 2(VI) chain precursor, medium splice | pir\|S09646\|S09646 | 3 | 1484 | 98 | 99 | HSYCG31 |
| | | form - human >sp\|P12110\|CA26_HUMAN | | | | | | |
| | | COLLAGEN ALPHA 2(VI) CHAIN | | | | | | |
| | | (FRAGMENT). {SUB 237-589} >gi\|179710 | | | | | | |
| | | alpha-2 collagen type VI-a [Homo sapiens] {SUB | | | | | | |
| | | 590-917} >gi\|30050 precursor polypeptide | | | | | | |
| | | (AA −20 to 234) | | | | | | |
| 248 | 827249 | (AF093119) UPH1 [Homo sapiens] | gi\|3676824 | 178 | 1476 | 98 | 98 | HSYDM77 |
| | | >sp\|O75967\|O75967 UPH1. Length = 439 | | | | | | |
| 249 | 827447 | | | 63 | 608 | | | HAPNR75 |
| 250 | 827515 | VatI [Homo sapiens] Length = 300 | gi\|1698401 | 2 | 850 | 95 | 95 | HTTED68 |
| 251 | 827621 | MLN 70, S100 C gene product [Homo sapiens] | gi\|951233 | 42 | 443 | 100 | 100 | HFNAC47 |
| | | >gnl\|PID\|d1008178 calgizzarin [Homo sapiens] | | | | | | |
| | | >gnl\|PID\|d1008950 human S100C protein [Homo | | | | | | |
| | | sapiens] >gi\|2605598 calcium binding protein | | | | | | |
| | | [Homo sapiens] >pir\|I37080\|I37080 calgizzarin - | | | | | | |
| | | human Length = 105 | | | | | | |
| 252 | 827883 | | | 666 | 1004 | | | HHFHV82 |
| 253 | 828040 | (AF023269) probable transcriptional regulator dre4 | gi\|2511745 | 54 | 1280 | 77 | 88 | HTTFM37 |
| | | [Drosophila melanogaster] >sp\|O17045\|O17045 | | | | | | |
| | | PROBABLE TRANSCRIPTIONAL REGULATOR | | | | | | |
| | | DRE4 (FRAGMENT). Length = 1059 | | | | | | |
| 254 | 828360 | ADP-ribosylation factor 4 [Homo sapiens] | gi\|178985 | 2 | 292 | 100 | 100 | HETFG60 |
| | | >pir\|B38622\|B38622 ADP-ribosylation factor 4 - | | | | | | |
| | | human >sp\|P18085\|ARF4_HUMAN ADP- | | | | | | |
| | | RIBOSYLATION FACTOR 4. {SUB 2-180} | | | | | | |
| | | >gnl\|PID\|e276443 ADP-ribosylation factor 4 [Sus | | | | | | |
| | | scrofa] {SUB 1-51} Length = 180 | | | | | | |
| 255 | 828506 | rac2 gene product [Canis familiaris] >gi\|190824 ras- | gi\|922 | 182 | 319 | 100 | 100 | HDQHC41 |
| | | related C3 botulinum toxin substrate [Homo sapiens] | | | | | | |
| | | >gi\|53886 ras-related C3 botulinium toxin substrate | | | | | | |
| | | [Mus musculus] >gi\|3184510 GTPase cRac1A | | | | | | |
| | | [Gallus gallus] >pir\|A34788\|TVHUC1 GTP-binding | | | | | | |
| | | protein rac | | | | | | |
| 256 | 828517 | p120E4F transcription factor [Homo sapiens] | gi\|1906602 | 2 | 379 | 84 | 84 | HPJDE77 |
| | | >sp\|O00146\|O00146 P120E4F TRANSCRIPTION | | | | | | |
| | | FACTOR. Length = 783 | | | | | | |
| 257 | 828898 | iron regulatory factor [Homo sapiens] | gi\|33963 | 2 | 1252 | 100 | 100 | HMCBD26 |
| | | >pir\|S26403\|S26403 iron-responsive element- | | | | | | |
| | | binding protein - human | | | | | | |
| | | >sp\|P21399\|IRE1_HUMAN IRON- | | | | | | |
| | | RESPONSIVE ELEMENT BINDING PROTEIN 1 | | | | | | |
| | | (IRE-BP 1) (IRON REGULATORY PROTEIN 1) | | | | | | |
| | | (IRP1) (FERRITIN REPRESSOR PROTEIN) | | | | | | |
| | | (ACONITATE | | | | | | |
| 258 | 828959 | | | 1681 | 2115 | | | HGBBQ46 |
| 259 | 829081 | core protein II precursor [Homo sapiens] | gi\|180928 | 3 | 953 | 88 | 88 | HOSFO12 |
| | | >pir\|A32629\|A32629 ubiquinol--cytochrome-c | | | | | | |
| | | reductase (EC 1.10.2.2) core protein II - human | | | | | | |
| | | Length = 453 | | | | | | |
| 260 | 830069 | (AC004492) HMG box containing protein 1 [Homo | gi\|2995607 | 3 | 1073 | 95 | 95 | HDPBR82 |
| | | sapiens] >sp\|O60381\|O60381 HMG BOX | | | | | | |
| | | CONTAINING PROTEIN 1. Length = 514 | | | | | | |
| 261 | 830109 | | | 103 | 645 | | | HCIAA79 |
| 262 | 830176 | protein kinase C mu [Homo sapiens] | gi\|438373 | 1 | 1131 | 86 | 92 | HAPTB14 |
| | | >pir\|A53215\|A53215 protein kinase C (EC 2.7.1.-) | | | | | | |
| | | mu - human >sp\|Q15139\|KPCM_HUMAN | | | | | | |
| | | PROTEIN KINASE C, MU TYPE (EC 2.7.1.-) | | | | | | |
| | | (NPKC-MU). Length = 912 | | | | | | |
| 263 | 830241 | (AF065482) sorting nexin 2 [Homo sapiens] | gi\|3152938 | 1 | 1242 | 37 | 58 | HTEJV04 |
| | | >sp\|O60749\|O60749 SORTING NEXIN 2. Length = | | | | | | |
| | | 519 | | | | | | |
| 264 | 830264 | transcription regulator helix-loop-helix protein = Id1 | bbs\|169359 | 1 | 369 | 80 | 80 | HAPTA45 |
| | | Id1-a [human, glioblastoma cell line U251, Peptide, | | | | | | |
| | | 155 aa] [Homo sapiens] >gi\|1816512 helix-loop- | | | | | | |
| | | helix protein Id-1 [Homo sapiens] | | | | | | |
| | | >pir\|JC5395\|JC5395 helix-loop-helix protein Id1 - | | | | | | |
| | | human Length = 155 | | | | | | |
| 265 | 830402 | | | 1138 | 1482 | | | HWBEA34 |
| 266 | 830414 | thromboxane synthase [Homo sapiens] | gi\|338704 | 126 | 1079 | 94 | 94 | HMCIR67 |
| | | >pir\|A41766\|A41766 thromboxane-A synthase (EC | | | | | | |
| | | 5.3.99.5) I - human Length = 534 | | | | | | |
| 267 | 830444 | mhc antigen DC-alpha chain [Homo sapiens] | gi\|307243 | 67 | 630 | 100 | 100 | HTAAY31 |
| | | >gnl\|PID\|e307041 HLA-DQA1*05011 [Homo | | | | | | |
| | | sapiens] >gi\|2665521 MHC class II DC-alpha | | | | | | |
| | | [Homo sapiens] >pir\|A02215\|HLHU3C MHC class | | | | | | |
| | | II histocompatibility antigen HLA-DQ alpha 1 chain | | | | | | |
| | | precursor (allele DQA1*0501) - human | | | | | | |
| 268 | 830476 | non-muscle myosin heavy chain [Bos taurus] | gi\|3205211 | 1 | 1122 | 36 | 50 | HWLHB64 |
| | | >sp\|O02717\|O02717 NON-MUSCLE MYOSIN | | | | | | |
| | | HEAVY CHAIN (FRAGMENT). Length = 625 | | | | | | |
| 269 | 830624 | mRNA export protein [Homo sapiens] Length = 368 | gi\|1903456 | 149 | 1387 | 100 | 100 | HTEPA57 |
| 270 | 830643 | CDC2-related kinase [Homo sapiens] | gi\|493130 | 1 | 1122 | 100 | 100 | HTDAB49 |
| | | >pir\|A55262\|A55262 protein kinase (EC 2.7.1.37) | | | | | | |
| | | cdc2-related PITALRE - human | | | | | | |
| | | >sp\|P50750\|CDK9_HUMAN CELL DIVISION | | | | | | |
| | | PROTEIN KINASE 9 (EC 2.7.1.-) | | | | | | |
| | | (SERINE/THREONINE-PROTEIN KINASE | | | | | | |
| | | PITALRE) (C-2K). Length = 372 | | | | | | |
| 271 | 830714 | fibroblast growth factor receptor-FLG precursor | gi\|31378 | 1 | 2292 | 95 | 95 | HSSMW37 |
| | | [Homo sapiens] >gi\|31393 Fibroblast Growth Factor | | | | | | |
| | | Receptor, 3-Ig Domain+2 AA insert [Homo sapiens] | | | | | | |
| | | >gi\|35110 fibroblast growth factor receptor [Homo | | | | | | |
| | | sapiens] >pir\|S11692\|TVHUFG fibroblast growth | | | | | | |
| | | factor recep | | | | | | |
| 272 | 830826 | plasminogen activator preprotein [Homo sapiens] | gi\|35283 | 114 | 593 | 92 | 92 | HAJAC29 |
| | | >pir\|I38098\|I38098 t-plasminogen activator (EC | | | | | | |
| | | 3.4.21.68) precursor (variant) - human Length = 291 | | | | | | |
| 273 | 830888 | von Ebner minor salivary gland protein [Mus | gi\|1184790 | 1 | 663 | 64 | 81 | HPSNE01 |
| | | musculus] >sp\|Q61114\|Q61114 VON EBNER | | | | | | |
| | | MINOR SALIVARY GLAND PROTEIN. Length = | | | | | | |
| | | 310 | | | | | | |
| 274 | 830984 | antigen [Homo sapiens] >gi\|30949 pre-pro | gi\|188543 | 215 | 799 | 61 | 61 | HOEKY01 |
| | | polypeptide (AA −22 to 163) [Homo sapiens] | | | | | | |
| | | >pir\|S06786\|A60592 T-cell surface glycoprotein E2 | | | | | | |
| | | precursor - human >sp\|P14209\|MIC2_HUMAN T- | | | | | | |
| | | CELL SURFACE GLYCOPROTEIN E2 | | | | | | |
| | | PRECURSOR (E2 ANTIGEN) (CD99) (MIC2 | | | | | | |
| | | PROTEIN) (12E7 | | | | | | |
| 275 | 831015 | putative surface glycoprotein [Homo sapiens] | gnl\|PID\|e188111 | 79 | 633 | 88 | 88 | HHEUT43 |
| | | >sp\|P53801\|C211_HUMAN PUTATIVE | | | | | | |
| | | SURFACE GLYCOPROTEIN C21ORF1 | | | | | | |
| | | PRECURSOR (C21ORF3). Length = 180 | | | | | | |
| 276 | 831080 | lymphoma 3-encoded protein (bcl-3) [Homo | gi\|179376 | 3 | 1703 | 77 | 83 | HADDQ39 |
| | | sapiens] >pir\|A34794\|A34794 B-cell CLL/ | | | | | | |
| | | lymphoma 3 (BCL3) protein - human | | | | | | |
| | | >sp\|P20749\|BCL3_HUMAN B-CELL | | | | | | |
| | | LYMPHOMA 3-ENCODED PROTEIN (BCL-3 | | | | | | |
| | | PROTEIN). >gi\|533381 homologous to members of | | | | | | |
| | | the I-kappa B family; protein bi | | | | | | |
| 277 | 831101 | zinc finger transcriptional regulator [Homo sapiens] | gi\|183443 | 3 | 899 | 66 | 66 | HEOMO83 |
| | | >gi\|340013 tristetraproline [Homo sapiens] | | | | | | |
| | | >gi\|183445 zinc finger transcriptional regulator | | | | | | |
| | | [Homo sapiens] >pir\|S34427\|S34427 tristetraproline | | | | | | |
| | | protein - human Length = 326 | | | | | | |
| 278 | 831146 | (AF104670) cell cycle protein [Homo sapiens] | gi\|4160449 | 2 | 916 | 93 | 93 | HDPTO32 |
| | | >gi\|4099506 erbB3 binding protein EBP1 [Homo | | | | | | |
| | | sapiens] {SUB 55-394} Length = 394 | | | | | | |
| 279 | 831215 | farnesyl-protein transferase alpha-subunit [Homo | gi\|292031 | 1 | 1182 | 96 | 96 | HMTAH30 |
| | | sapiens] >gi\|388756 farnesyl-protein transferase | | | | | | |
| | | alpha-subunit [Homo sapiens] >pir\|A47659\|A47659 | | | | | | |
| | | farnesyl-protein transferase alpha chain - human | | | | | | |
| | | >sp\|P49354\|PFTA_HUMAN PROTEIN | | | | | | |
| | | FARNESYLTRANSFERASE ALPHA SUBU | | | | | | |
| 280 | 831231 | unknown orf, len: 393, CAI: 0.13 [Saccharomyces | gi\|575701 | 2 | 1012 | 28 | 51 | HMAIE05 |
| | | cerevisiae] >pir\|S49759\|S49759 probable membrane | | | | | | |
| | | protein YML018c - yeast (Saccharomyces | | | | | | |
| | | cerevisiae) Length = 393 | | | | | | |
| 281 | 831242 | heat-shock protein HSP70B [Homo sapiens] | gi\|35222 | 105 | 2099 | 91 | 91 | HTTIV15 |
| | | >pir\|S09036\|S09036 dnaK-type molecular chaperone | | | | | | |
| | | HSPA6 - human >sp\|P17066\|HS76_HUMAN | | | | | | |
| | | HEAT SHOCK 70 KD PROTEIN 6 (HEAT | | | | | | |
| | | SHOCK 70 KD PROTEIN B′). >gi\|35224 heat | | | | | | |
| | | shock protein 70B′ (AA 355-643) [Homo sapiens] | | | | | | |
| | | {SUB 35 | | | | | | |
| 282 | 831267 | | | 246 | 464 | | | HLTGF11 |
| 283 | 831272 | | | 641 | 1006 | | | HLTDR01 |
| 284 | 831291 | glutathione peroxidase-GI [Homo sapiens] Length = | gi\|579930 | 228 | 677 | 99 | 99 | HLQER45 |
| | | 190 | | | | | | |
| 285 | 831382 | epoxide hydrolase [Homo sapiens] Length = 455 | gi\|450269 | 541 | 1116 | 87 | 87 | HFVHG01 |
| 286 | 831624 | ornithine decarboxylase [Homo sapiens] >gi\|386989 | gi\|189371 | 164 | 1561 | 100 | 100 | H2CBM53 |
| | | ornithine decarboxylase [Homo sapiens] >gi\|338278 | | | | | | |
| | | ornithine decarboxylase [Homo sapiens] >gi\|338280 | | | | | | |
| | | ornithine decarboxylase [Homo sapiens] >gi\|35136 | | | | | | |
| | | ornithine decarboxylase [Homo sapiens] >gi\|296667 | | | | | | |
| | | ornith | | | | | | |
| 287 | 831640 | polypeptide BM28 [Homo sapiens] Length = 892 | gi\|468704 | 337 | 534 | 97 | 100 | HFXHK31 |
| 288 | 831688 | vascular anticoagulating protein [unidentified] | gi\|410788 | 164 | 787 | 100 | 100 | HELFR81 |
| | | >gi\|412271 VAC alpha [Mus musculus] >gi\|179132 | | | | | | |
| | | anticoagulant precursor (5′ end put.); putative | | | | | | |
| | | [Homo sapiens] >gi\|307116 lipocortin-V [Homo | | | | | | |
| | | sapiens] >gi\|182112 endonexin II [Homo sapiens] | | | | | | |
| | | >gi\|37637 VAC prot | | | | | | |
| 289 | 831690 | membrane cofactor preprotein (AA −34 to 350) | gi\|34505 | 46 | 1308 | 85 | 85 | HOUHT44 |
| | | [Homo sapiens] >pir\|S01896\|SO1896 membrane | | | | | | |
| | | cofactor protein precursor - human | | | | | | |
| | | >sp\|G232300\|G232300 MEMBRANE COFACTOR | | | | | | |
| | | PROTEIN, MCP, CD46 {ALTERNATIVELY | | | | | | |
| | | SPLICED}. {SUB 286-384} Length = 384 | | | | | | |
| 290 | 831718 | ets2 protein [Homo sapiens] >gi\|2736087 | gi\|182273 | 2 | 316 | 100 | 100 | HFIXE61 |
| | | (AF017257) erythroblastosis virus oncogene | | | | | | |
| | | homolog 2 protein [Homo sapiens] | | | | | | |
| | | >pir\|B32066\|TVHUE2 transcription factor ets-2 - | | | | | | |
| | | human >sp\|P15036\|ETS2_HUMAN C-ETS-2 | | | | | | |
| | | PROTEIN. >gi\|182271 ets protein [Homo sapiens] | | | | | | |
| | | {SUB 324 | | | | | | |
| 291 | 831832 | | | 881 | 1108 | | | HE8SB04 |
| 292 | 831907 | | | 92 | 307 | | | HLHCN83 |
| 293 | 831938 | aldehyde dehydrogenase (NAD+) (EC 1.2.1.3) 2 | pir\|A29975\|DEHUE2 | 54 | 1289 | 95 | 95 | HDPXK32 |
| | | precursor, mitochondrial - human | | | | | | |
| | | >sp\|P05091\|DHAM_HUMAN ALDEHYDE | | | | | | |
| | | DEHYDROGENASE, MITOCHONDRIAL | | | | | | |
| | | PRECURSOR (EC 1.2.1.3) (CLASS 2) (ALDHI) | | | | | | |
| | | (ALDH-E2). Length = 517 | | | | | | |
| 294 | 831954 | | | 1 | 825 | | | HDPTA79 |
| 295 | 832028 | KM-102-derived reductase-like factor [Homo | gnl\|PID\|d1014370 | 494 | 1051 | 97 | 97 | HDABD11 |
| | | sapiens] >sp\|Q99475\|Q99475 KM-102-DERIVED | | | | | | |
| | | REDUCTASE-LIKE FACTOR. >gnl\|PID\|e1249328 | | | | | | |
| | | (AJ001050) thioredoxin reductase [Homo sapiens] | | | | | | |
| | | {SUB 53-549} Length = 549 | | | | | | |
| 296 | 832043 | similar to human 22kDa, SM22 mRNA | gnl\|PID\|d1005335 | 31 | 504 | 100 | 100 | HTTAQ18 |
| | | (HUM22SM). [Homo sapiens] Length = 199 | | | | | | |
| 297 | 832055 | | | 194 | 334 | | | HCRQC81 |
| 298 | 832124 | | | 520 | 1155 | | | HADCL25 |
| 299 | 832145 | | | 21 | 185 | | | HCQDA34 |
| 300 | 832254 | | | 2 | 565 | | | HCLBG05 |
| 301 | 832331 | | | 123 | 506 | | | HBJBQ28 |
| 302 | 832360 | calpastatin [Homo sapiens] Length = 464 | gi\|951315 | 89 | 811 | 83 | 83 | HPFDI59 |
| 303 | 832401 | Ubiquitin-conjugating enzyme UbcH2 [Homo | gi\|474827 | 1 | 558 | 90 | 90 | HTEAB10 |
| | | sapiens] >gi\|483538 ubiquitin-conjugating enzyme | | | | | | |
| | | UbcH2 [Homo sapiens] >gi\|897847 E2-20K [Mus | | | | | | |
| | | musculus] >pir\|A53516\|A53516 ubiquitin- | | | | | | |
| | | conjugating enzyme UbcH2 - human | | | | | | |
| | | >pir\|JC4308\|JC4308 ubiquitin--protein ligase (EC | | | | | | |
| 304 | 832403 | | | 150 | 269 | | | HAPCK19 |
| 305 | 832437 | | | 1470 | 1664 | | | HFIUK77 |
| 306 | 832492 | adenylate kinase 2B [Homo sapiens] | gi\|1477653 | 2 | 430 | 100 | 100 | HLJBH37 |
| | | >pir\|JC5893\|JC5893 adenylate kinase (EC 2.7.4.3) | | | | | | |
| | | 2B - human Length = 232 | | | | | | |
| 307 | 832598 | CCAAT/enhancer binding protein gamma [Rattus | gi\|55928 | 383 | 790 | 92 | 93 | H2LAC64 |
| | | norvegicus] >pir\|S26300\|S26300 transcription factor | | | | | | |
| | | C/EBP-gamma - rat (fragment) | | | | | | |
| | | >sp\|P26801\|CEBG_RAT CCAAT/ENHANCER | | | | | | |
| | | BINDING PROTEIN GAMMA (C/EBP GAMMA). | | | | | | |
| | | {SUB 86-235} Length = 235 | | | | | | |
| 308 | 832605 | CRM1 protein [Homo sapiens] >sp\|O14980\|O14980 | gi\|2626840 | 668 | 3322 | 99 | 99 | H2CBU81 |
| | | CRM1 PROTEIN. Length = 1071 | | | | | | |
| 309 | 834510 | macrophage inflammatory protein-1-alpha [Homo | gi\|292417 | 3 | 629 | 81 | 81 | HMSGD45 |
| | | sapiens] >gi\|179985 C-C chemokine receptor type 1 | | | | | | |
| | | [Homo sapiens] >pir\|A45177\|A45177 chemokine | | | | | | |
| | | (C-C) receptor 1 - human >sp\|P32246\|CKR1_HU- | | | | | | |
| | | MAN C-C CHEMOKINE RECEPTOR TYPE 1 | | | | | | |
| | | (C-C CKR-1) (CC-CKR-1) (CCR-1) (CCR1) | | | | | | |
| 310 | 835139 | (AF106518) sialomucin CD164 [Homo sapiens] | gi\|3941728 | 42 | 683 | 89 | 89 | HAMFI84 |
| | | >sp\|G3941728\|G3941728 SIALOMUCIN CD164. | | | | | | |
| | | Length = 178 | | | | | | |
| 311 | 835142 | (AF029213) IL-1 receptor accessory protein [Homo | gi\|2599127 | 3 | 1091 | 44 | 60 | HJPDH20 |
| | | sapiens] >gnl\|PID\|d1026349 (AB006537) inter- | | | | | | |
| | | leukin 1 receptor accessory protein [Homo sapiens] | | | | | | |
| | | >sp\|O14915\|O14915 IL-1 RECEPTOR | | | | | | |
| | | ACCESSORY PROTEIN. >gi\|2909775 (AF016261) | | | | | | |
| | | interleukin-1 receptor accessory prote | | | | | | |
| 312 | 835271 | (AJ005766) LAMP [Homo sapiens] | gnl\|PID\|e1363772 | 3 | 698 | 90 | 90 | HDQHB46 |
| | | >sp\|E1363772\|E1363772 LAMP PRECURSOR. | | | | | | |
| | | Length = 416 | | | | | | |
| 313 | 835369 | melanoma-associated antigen [Homo sapiens] | gi\|189384 | 3 | 386 | 87 | 87 | HLJEA92 |
| | | >gi\|34527 ME491 antigen precursor (AA −1 to 237) | | | | | | |
| | | [Homo sapiens] >bbs\|93790 ocular melanoma- | | | | | | |
| | | associated antigen, OMA81H [human, uveal | | | | | | |
| | | melanoma, Peptide, 238 aa] [Homo sapiens] | | | | | | |
| | | >gi\|430756 ME491/CD63 antigen [Homo s | | | | | | |
| 314 | 835430 | | | 470 | 1240 | | | HWBDL33 |
| 315 | 835462 | (AF083236) FLDED-1 [Homo sapiens] | gi\|3462834 | 1 | 957 | 62 | 79 | HLDOK36 |
| | | >gnl\|PID\|e1334489 (AJ010973) DEDD protein | | | | | | |
| | | [Homo sapiens] >gi\|3930213 (AF043733) death | | | | | | |
| | | effector domain-containing testicular molecule | | | | | | |
| | | [Homo sapiens] >sp\|O75618\|O75618 FLDED-1. | | | | | | |
| | | >sp\|G3930213\|G3930213 DEATH EFFECTOR | | | | | | |
| | | DOMAIN-CO | | | | | | |
| 316 | 835539 | pre-mRNA splicing factor [Homo sapiens] | gi\|338484 | 46 | 510 | 100 | 100 | HWAAP51 |
| | | >gi\|55440 X16 gene product [Mus musculus] | | | | | | |
| | | >gnl\|PID\|e274089 splicing factor [Mus musculus] | | | | | | |
| | | >pir\|S14016\|S14016 | | | | | | |
| | | X16 protein - mouse >pir\|I54089\|I54089 pre-mRNA | | | | | | |
| | | splicing factor - human Length = 164 | | | | | | |
| 317 | 835635 | (AF097181) tuftelin-interacting protein 10 [Mus | gi\|3851164 | 2 | 2260 | 92 | 96 | HDPKE84 |
| | | musculus] >gi\|3851164 (AF097181) tuftelin- | | | | | | |
| | | interacting protein 10 [Mus musculus] | | | | | | |
| | | >sp\|G3851164\|G3851164 TUFTELIN- | | | | | | |
| | | INTERACTING PROTEIN 10. Length = 526 | | | | | | |
| 318 | 835815 | phosphate cyclase [Homo sapiens] | gnl\|PID\|e311534 | 99 | 581 | 94 | 94 | HSIAQ09 |
| | | >gnl\|PID\|e311729 | | | | | | |
| | | phosphate cyclase [Homo sapiens] {SUB 1-48} | | | | | | |
| | | Length = 366 | | | | | | |
| 319 | 836161 | mutant N-acetylglucosaminyltransferase I | gi\|1531641 | 816 | 2288 | 48 | 68 | HISCD15 |
| | | [Cricetulus griseus] Length = 447 | | | | | | |
| 320 | 836213 | URF 3 (NADH dehydrogenase subunit) [Homo | gi\|13011 | 87 | 245 | 90 | 97 | HAVMH34 |
| | | sapiens] >gi\|506832 protein 3 [Homo sapiens] | | | | | | |
| | | >pir\|A00422\|DNHUN3 NADH dehydrogenase | | | | | | |
| | | (ubiquinone) (EC 1.6.5.3) chain 3 - human | | | | | | |
| | | mitochondrion (SGC1) | | | | | | |
| | | >sp\|P03897\|NU3M_HUMAN NADH- | | | | | | |
| | | UBIQUINONE OXIDOREDUCTASE CHAIN 3 | | | | | | |
| | | (EC 1.6 | | | | | | |
| 321 | 836371 | Similar to sulfatase [Caenorhabditis elegans] | gi\|1125842 | 3 | 530 | 60 | 74 | HSYBS71 |
| | | >sp\|Q21376\|Q21376 SIMILAR TO SULFATASE. | | | | | | |
| | | NCBIGI: 1125842. Length = 709 | | | | | | |
| 322 | 836618 | (AF079446) developmental protein DG1067 | gi\|3420747 | 76 | 1035 | 50 | 75 | HWAGL94 |
| | | [Dictyostelium discoideum] >sp\|O76738\|O76738 | | | | | | |
| | | DEVELOPMENTAL PROTEIN DG1067 | | | | | | |
| | | (FRAGMENT). Length = 338 | | | | | | |
| 323 | 836895 | (AF039695) antigen NY-CO-25 [Homo sapiens] | gi\|3170190 | 2 | 2545 | 98 | 98 | HNTCG15 |
| | | >sp\|G3170190\|G3170190 ANTIGEN NY-CO-25 | | | | | | |
| | | (FRAGMENT). >gnl\|PID\|d1013881 similar to | | | | | | |
| | | mouse heat shock protein 105 kDa beta [Homo | | | | | | |
| | | sapiens] {SUB 15-872} Length = 872 | | | | | | |
| 324 | 837181 | | | 129 | 1046 | | | HDTLB55 |
| 325 | 837238 | similar to DNAJ [Caenorhabditis elegans] | gnl\|PID\|e1349481 | 54 | 1265 | 58 | 78 | HCHOH96 |
| | | Length = 355 | | | | | | |
| 326 | 837337 | | | 1078 | 1446 | | | HKABZ88 |
| 327 | 837530 | prostaglandin transporter hPGT [Homo sapiens] | gi\|1617590 | 2 | 517 | 43 | 72 | HKIYF62 |
| | | >gi\|3676522 (AF056732) prostaglandin transporter | | | | | | |
| | | [Homo sapiens] >sp\|Q92959\|PGT_HUMAN | | | | | | |
| | | PROSTAGLANDIN TRANSPORTER (PGT). | | | | | | |
| | | >sp\|G3676522\|G3676522 PROSTAGLANDIN | | | | | | |
| | | TRANSPORTER. Length = 643 | | | | | | |
| 328 | 837551 | (AF038960) SKD1 homolog [Homo sapiens] | gi\|3329390 | 2 | 1396 | 84 | 94 | HEGAU95 |
| | | >sp\|O75351\|O75351 SKD1 HOMOLOG. Length = | | | | | | |
| | | 444 | | | | | | |
| 329 | 837622 | | | 84 | 1484 | | | HNFIB27 |
| 330 | 839908 | | | 470 | 691 | | | HTTFW42 |
| 331 | 839949 | (AL008726) dJ337O18.2 (Lysosomal Protective | gnl\|PID\|e1296581 | 3 | 1478 | 100 | 100 | HDPRY42 |
| | | Protein precursor (EC 3.4.16.5, Cathepsin A, | | | | | | |
| | | Carboxypeptidase C)) [Homo sapiens] | | | | | | |
| | | >sp\|O60790\|O60790 DJ337O18.2 (LYSOSOMAL | | | | | | |
| | | PROTECTIVE PROTEIN PRECURSOR (EC | | | | | | |
| | | 3.4.16.5, CATHEPSIN A, CARBOXYPEPTIDASE | | | | | | |
| | | C)). Length = 480 | | | | | | |
| 332 | 840000 | | | 489 | 1880 | | | HPTXG77 |
| 333 | 840095 | | | 564 | 1580 | | | HOEBZ29 |
| 334 | 840166 | put. homologue to S.cerevisiae GAR1 gene | gi\|510509 | 188 | 769 | 62 | 78 | HLHEY06 |
| | | [Drosophila melanogaster] >pir\|S49193\|S49193 | | | | | | |
| | | GCR 101 protein - fruit fly (Drosophila | | | | | | |
| | | melanogaster) >sp\|Q24345\|Q24345 GCR 101 | | | | | | |
| | | MRNA. Length = 239 | | | | | | |
| 335 | 840249 | ATPase 6 [Homo sapiens] >gi\|2052364 ATPase 6 | gi\|13009 | 520 | 870 | 65 | 68 | HLJDL64 |
| | | [Homo sapiens] >pir\|A01049\|PWHU6 H+- | | | | | | |
| | | transporting ATP synthase (EC 3.6.1.34) protein 6 - | | | | | | |
| | | human mitochondrion (SGC1) | | | | | | |
| | | >sp\|P00846\|ATP6_HUMAN ATP SYNTHASE A | | | | | | |
| | | CHAIN (EC 3.6.1.34) (PROTEIN 6). Length = 226 | | | | | | |
| 336 | 840601 | integrin-linked kinase [Homo sapiens] | gi\|3150002 | 1 | 1287 | 99 | 99 | HOEKB20 |
| | | >sp\|Q13418\|Q13418 INTEGRIN-LINKED | | | | | | |
| | | KINASE. Length = 452 | | | | | | |
| 337 | 840613 | (AJ012463) transcription factor [Homo sapiens] | gnl\|PID\|e1339598 | 126 | 2504 | 96 | 96 | HARNB15 |
| | | >sp\|E1339598\|E1339598 TRANSCRIPTION | | | | | | |
| | | FACTOR. Length = 770 | | | | | | |
| 338 | 840699 | t-complex polypeptide 1 (AA 1-556) [Homo | gi\|36796 | 2 | 1015 | 94 | 95 | HTENT25 |
| | | sapiens] Length = 556 | | | | | | |
| 339 | 840752 | | | 491 | 790 | | | HDPDD66 |
| 340 | 840755 | RAB14 [Rattus norvegicus] Length = 215 | gi\|206535 | 3 | 938 | 99 | 99 | HHFFM77 |
| 341 | 840844 | | | 1 | 219 | | | HMELM17 |
| 342 | 841066 | J kappa RS-binding protein [Mus musculus] | gi\|52757 | 79 | 1629 | 96 | 96 | H6EER20 |
| | | >bbs\|63468 J kappa recombination signal sequence | | | | | | |
| | | binding protein, RBP-2 [mice, pre B cell line 38B9, | | | | | | |
| | | Peptide, 526 aa] [Mus sp.] >pir\|A43567\|A43567 J- | | | | | | |
| | | kappa recombination sequence-binding protein - | | | | | | |
| | | mouse >gi\|554133 | | | | | | |
| 343 | 841306 | La/SS-B [Drosophila melanogaster] | gi\|464020 | 64 | 696 | 51 | 76 | HEMEU88 |
| | | >pir\|A53773\|A53773 La/SS-B homolog D-la - fruit | | | | | | |
| | | fly (Drosophila melanogaster) | | | | | | |
| | | >sp\|P40796\|LA_DROME LA PROTEIN | | | | | | |
| | | HOMOLOG (LA RIBONUCLEOPROTEIN) (LA | | | | | | |
| | | AUTOANTIGEN HOMOLOG). Length = 390 | | | | | | |
| 344 | 841913 | | | 44 | 217 | | | HDPDC94 |
| 345 | 842025 | prepromultimerin [Homo sapiens] | gi\|927596 | 2 | 1414 | 98 | 98 | HB9OX09 |
| | | >sp\|Q13201\|ECM_HUMAN ENDOTHELIAL | | | | | | |
| | | CELL MULTIMERIN PRECURSOR. Length = | | | | | | |
| | | 1228 | | | | | | |
| 346 | 842178 | | | 3 | 986 | | | HSKCF20 |
| 347 | 842438 | down syndrome candidate region 1; one of four | gi\|2612866 | 3 | 428 | 98 | 100 | HDTEJ47 |
| | | alternatively spliced exon 1 [Homo sapiens] | | | | | | |
| | | >sp\|O00582\|O00582 DOWN SYNDROME | | | | | | |
| | | CRITICAL REGION 1 PROTEIN. >gi\|2618743 | | | | | | |
| | | down syndrome candidate region 1; one of four | | | | | | |
| | | alternatively spliced exon 1 [Homo sapiens] {SUB | | | | | | |
| 348 | 843289 | (AF013249) leukocyte-associated Ig-like receptor-1 | gi\|2352941 | 334 | 1299 | 94 | 94 | HMCFH47 |
| | | [Homo sapiens] Length = 287 | | | | | | |
| 349 | 843447 | (AB000221) CC chemokine [Homo sapiens] | gnl\|PID\|d1022520 | 42 | 332 | 100 | 100 | HAPBV34 |
| | | >gnl\|PID\|e321838 CC-chemokine 1 [Homo sapiens] | | | | | | |
| | | >gi\|3426362 (AF082214) CC chemokine DC-CK- | | | | | | |
| | | 1/PARC/MIP-4 [Homo sapiens] >gnl\|PID\|d1035349 | | | | | | |
| | | (AB012113) CC chemokine PARC precursor [Homo | | | | | | |
| | | sapiens] >sp\|P55774\|MIP4_HUMAN MACRO | | | | | | |
| 350 | 843743 | gamma-interferon-inducible protein precursor | gi\|307042 | 3 | 803 | 88 | 88 | HMAKA82 |
| | | [Homo sapiens] >pir\|A43708\|A43708 gamma- | | | | | | |
| | | interferon-inducible protein IP-30 precursor - human | | | | | | |
| | | >sp\|P13284\|INIP_HUMAN GAMMA- | | | | | | |
| | | INTERFERON-INDUCIBLE PROTEIN IP-30 | | | | | | |
| | | PRECURSOR. Length = 303 | | | | | | |
| 351 | 843878 | MHC class II DP3-alpha [Homo sapiens] | gi\|703089 | 42 | 932 | 76 | 76 | HDPNI27 |
| | | >gi\|673417 class II antigen [Homo sapiens] | | | | | | |
| | | >pir\|A29313\|HLHUSB MHC class II | | | | | | |
| | | histocompatibility antigen HLA-DP alpha-1 chain | | | | | | |
| | | precursor - human >sp\|P20036\|HA2Q_HUMAN | | | | | | |
| | | HLA CLASS II HISTOCOMPATIBILITY | | | | | | |
| | | ANTIGEN, DP ALPHA CHAI | | | | | | |
| 352 | 843964 | | | 318 | 656 | | | HSLDM31 |
| 353 | 844071 | TAR DNA-binding protein-43 [Homo sapiens] | gi\|901998 | 125 | 1369 | 100 | 100 | HTDAI19 |
| | | >pir\|I38977\|I38977 TAR DNA-binding protein-43 - | | | | | | |
| | | human >sp\|Q13148\|Q13148 TAR DNA-BINDING | | | | | | |
| | | PROTEIN-43. Length = 414 | | | | | | |
| 354 | 844444 | Similar to man(9)-alpha-mannosidase | gi\|1086860 | 2 | 1828 | 53 | 73 | HOUFX18 |
| | | [Caenorhabditis elegans] >sp\|Q22120\|Q22120 | | | | | | |
| | | SIMILAR TO MAN(9)-ALPHA-MANNOSIDASE. | | | | | | |
| | | NCBI GI: 1086860. Length = 531 | | | | | | |
| 355 | 844561 | | | 3 | 320 | | | HWAET73 |
| 356 | 844953 | | | 1679 | 2020 | | | HHESF05 |
| 357 | 844990 | | | 2 | 1090 | | | HCGMF32 |
| 358 | 845379 | similar to alcohol dehydrogenase/ribitol | gi\|2731377 | 3 | 1745 | 52 | 74 | HDABU82 |
| | | dehydrogenase [Caenorhabditis elegans] | | | | | | |
| | | >sp\|Q09979\|Q09979 HYPOTHETICAL 105.9 KD | | | | | | |
| | | PROTEIN C17G10.8 IN CHROMOSOME II. | | | | | | |
| | | Length = 938 | | | | | | |
| 359 | 845829 | fatty aldehyde dehydrogenase [Homo sapiens] | gi\|1666529 | 19 | 924 | 94 | 94 | HOEJR65 |
| | | Length = 508 | | | | | | |
| 360 | HTAIR72R | | | 171 | 302 | | | HTAIR72 |
| 361 | HAGDU65R | (AB020884) beta-actin [Plecoglossus altivelis] | gnl\|PID\|d1036110 | 1 | 291 | 67 | 67 | HAGDU65 |
| | | Length = 146 | | | | | | |
| 362 | HAPRM14R | (AF000381) non-functional folate binding protein | gi\|2565196 | 183 | 377 | 88 | 88 | HAPRM14 |
| | | [Homo sapiens] >sp\|O14597\|O14597 NON- | | | | | | |
| | | FUNCTIONAL FOLATE BINDING PROTEIN. | | | | | | |
| | | Length = 254 | | | | | | |
| 363 | HMWEI22R | (AF012024) integrin cytoplasmic domain associated | gi\|2307002 | 176 | 349 | 100 | 100 | HMWEI22 |
| | | protein; Icap-1b [Homo sapiens] | | | | | | |
| | | >sp\|O14714\|O14714 INTEGRIN CYTOPLASMIC | | | | | | |
| | | DOMAIN ASSOCIATED PROTEIN. Length = 150 | | | | | | |
| 364 | HE2IO29R | (AF018432) dUTPase [Homo sapiens] >gi\|1144332 | gi\|2443581 | 2 | 190 | 100 | 100 | HE2IO29 |
| | | deoxyuridine nucleotidohydrolase [Homo sapiens] | | | | | | |
| | | >gi\|1421818 deoxyuridine triphosphatase [Homo | | | | | | |
| | | sapiens] >pir\|G02777\|G02777 dUTP | | | | | | |
| | | pyrophosphatase (EC 3.6.1.23) - human >gi\|292877 | | | | | | |
| | | dUTP nucleotidohydrolase [Homo sa | | | | | | |
| 365 | HE8QG48R | (AF059524) reticulon gene family protein [Homo | gi\|4091868 | 70 | 552 | 97 | 97 | HESQG48 |
| | | sapiens] >sp\|G4091868\|G4091868 RETICULON | | | | | | |
| | | GENE FAMILY PROTEIN. Length = 236 | | | | | | |
| 366 | HCLSJ64R | (AJ005568) SPR2J protein [Mus musculus] | gnl\|PID\|e1289139 | 3 | 185 | 59 | 67 | HCLSJ64 |
| | | >sp\|O70561\|O70561 SPR2J PROTEIN. Length = | | | | | | |
| | | 109 | | | | | | |
| 367 | HAMFN44R | acidic ribosomal phosphoprotein (P2) [Homo | gi\|190236 | 2 | 262 | 97 | 97 | HAMFN44 |
| | | sapiens] >pir\|C27125\|R6HUP2 acidic ribosomal | | | | | | |
| | | protein P2 - human Length = 115 | | | | | | |
| 368 | HBNAZ15R | adenine phosphoribosyltransferase [Homo sapiens] | gi\|178867 | 46 | 345 | 90 | 90 | HBNAZ15 |
| | | >gi\|28819 adenine phosphonbosyltransferase (aprt) | | | | | | |
| | | [Homo sapiens] >pir\|S06232\|RTHUA adenine | | | | | | |
| | | phosphoribosyltransferase (EC 2.4.2.7) - human | | | | | | |
| | | >sp\|P07741\|APT_HUMAN ADENINE | | | | | | |
| | | PHOSPHORIBOSYLTRANSFERASE (EC 2.4.2.7) | | | | | | |
| 369 | HMCGG09R | apoferritin H chain [Homo sapiens] Length = 190 | gi\|28435 | 3 | 257 | 100 | 100 | HMCGG09 |
| 370 | HADFF69R | ATP synthase, oligomycin sensitivity conferring | gi\|1008080 | 2 | 265 | 88 | 88 | HADFF69 |
| | | protein [Homo sapiens] | | | | | | |
| | | >sp\|P48047\|ATPO_HUMAN ATP SYNTHASE | | | | | | |
| | | OLIGOMYCIN SENSITIVITY CONFERRAL | | | | | | |
| | | PROTEIN PRECURSOR, MITOCHONDRIAL (EC | | | | | | |
| | | 3.6.1.34) (OSCP). >bbs\|165246 oligomycin | | | | | | |
| | | sensitivity conferral protein oscp horn | | | | | | |
| 371 | HFPDJ19R | ATPase subunit 6 [Homo sapiens] | gnl\|PID\|d1007873 | 139 | 537 | 63 | 66 | HFPDJ19 |
| | | >sp\|Q34772\|Q34772 ATP SYNTHASE A CHAIN | | | | | | |
| | | (EC 3.6.1.34). Length = 226 | | | | | | |
| 372 | H2MBA81R | autoantigen [Homo sapiens] | gi\|179285 | 75 | 404 | 93 | 93 | H2MBA81 |
| | | >sp\|Q13823\|NGP1_HUMAN AUTOANTIGEN | | | | | | |
| | | NGP-1. Length = 731 | | | | | | |
| 373 | HBGOI21R | B-myb protein (AA 1-700) [Homo sapiens] | gi\|29472 | 3 | 368 | 100 | 100 | HBGOI21 |
| | | >pir\|S01991\|S01991 transforming protein B-myb - | | | | | | |
| | | human >sp\|P10244\|MYBB_HUMAN MYB- | | | | | | |
| | | RELATED PROTEIN B (B-MYB). Length = 700 | | | | | | |
| 374 | HCLCW23R | carboxylesterase hCE-2 [Homo sapiens] | gi\|1407780 | 3 | 164 | 100 | 100 | HCLCW23 |
| | | >sp\|Q16859\|Q16859 CARBOXYLESTERASE (EC | | | | | | |
| | | 3.1.1.1) (ALI-ESTERASE) (B-ESTERASE) | | | | | | |
| | | (MONOBUTYRASE) (COCAINE ESTERASE) | | | | | | |
| | | (PROCAINE ESTERASE) (METHYLBUTY- | | | | | | |
| | | RASE). Length = 550 | | | | | | |
| 375 | HOSNF11R | cytochrome oxidase I [Casuarius bennetti] | gi\|2198692 | 305 | 442 | 67 | 75 | HOSNF11 |
| | | >sp\|O03521\|COX1_CASBE CYTOCHROME C | | | | | | |
| | | OXIDASE POLYPEPTIDE I (EC 1.9.3.1) | | | | | | |
| | | (FRAGMENT). Length = 337 | | | | | | |
| 376 | H2CAC11R | elongation factor 1 alpha [Oryctolagus cuniculus] | gi\|495221 | 108 | 461 | 85 | 85 | H2CAC11 |
| | | >gi\|1551 elongation factor 1 alpha [Oryctolagus | | | | | | |
| | | cuniculus] >gi\|181963 elongation factor EF-1-alpha | | | | | | |
| | | [Homo sapiens] >gi\|31098 EF-1 alpha (aa 1-463) | | | | | | |
| | | [Homo sapiens] >pir\|B24977\|EFHU1 translation | | | | | | |
| | | elongation fac | | | | | | |
| 377 | HBCCK84R | exon [Homo sapiens] >pir\|I55360\|I55360 ornithine-- | gi\|553605 | 174 | 413 | 93 | 93 | HBCCK84 |
| | | oxo-acid transaminase (EC 2.6.1.13) - human | | | | | | |
| | | (fragment) Length = 42 | | | | | | |
| 378 | HOEMQ09R | extracellular protein [Homo sapiens] | gi\|458228 | 2 | 301 | 88 | 88 | HOEMQ09 |
| | | >pir\|I38449\|I38449 extracellular protein - human | | | | | | |
| | | >sp\|Q12805\|Q12805 EXTRACELLULAR | | | | | | |
| | | PROTEIN S1-5 PRECURSOR. Length = 387 | | | | | | |
| 379 | HMCHR51R | ferritin light subunit [Homo sapiens] | gi\|182518 | 2 | 490 | 74 | 75 | HMCHR51 |
| | | >gnl\|PID\|e284040 ferritin b-chain [Homo sapiens] | | | | | | |
| | | {SUB 1-26} Length = 175 | | | | | | |
| 380 | HALSF10R | fibrinogen gamma chain [Homo sapiens] >gi\|182439 | gi\|577054 | 3 | 188 | 85 | 86 | HALSF10 |
| | | fibrinogen gamma chain [Homo sapiens] | | | | | | |
| | | >sp\|P02679\|FIBG_HUMAN FIBRINOGEN | | | | | | |
| | | GAMMA-A CHAIN PRECURSOR. >gi\|577055 | | | | | | |
| | | gamma-fibrinogen chain fragment [Homo sapiens] | | | | | | |
| | | {SUB 209-270} Length = 437 | | | | | | |
| 381 | HOEMK17R | fibronectin [Homo sapiens] | gi\|4096860 | 1 | 159 | 70 | 72 | HOEMK17 |
| | | >sp\|G4096860\|G4096860 FIBRONECTIN | | | | | | |
| | | (FRAGMENT). Length = 545 | | | | | | |
| 382 | HTLHA89R | GDP dissociation inhibitor [Homo sapiens] | gi\|337395 | 3 | 80 | 100 | 100 | HTLHA89 |
| | | >gi\|456191 Human rho GDP-dissociation Inhibitor | | | | | | |
| | | 1(IEF 8118) [Homo sapiens] >gnl\|PID\|d1003602 | | | | | | |
| | | human rho GDI [Homo sapiens] >pir\|I38156\|I38156 | | | | | | |
| | | rho protein GDP-dissociation inhibitor 1 (IEF | | | | | | |
| | | 8118) - human >sp\|P52565\|G | | | | | | |
| 383 | HAGHZ15R | H-protein [Homo sapiens] >gnl\|PID\|d1001083 | gi\|184348 | 2 | 307 | 70 | 70 | HAGHZ15 |
| | | hydrogen carrier protein precursor [Homo sapiens] | | | | | | |
| | | >pir\|A36662\|GCHUH glycine cleavage system | | | | | | |
| | | protein H precursor - human | | | | | | |
| | | >sp\|P23434\|GCSH_HUMAN GLYCINE | | | | | | |
| | | CLEAVAGE SYSTEM H PROTEIN | | | | | | |
| | | PRECURSOR. Length = 173 | | | | | | |
| 384 | HWAFE43R | hla-dr antigen alpha chain [Homo sapiens] | gi\|307264 | 3 | 422 | 93 | 93 | HWAFE43 |
| | | >gi\|386945 HLA-DR alpha-chain [Homo sapiens] | | | | | | |
| | | >gi\|307267 HLA-DR alpha-chain [Homo sapiens] | | | | | | |
| | | >pir\|A93952\|HLHUDA MHC class II | | | | | | |
| | | histocompatibility antigen HLA-DR alpha chain | | | | | | |
| | | precursor - human >sp\|P01903\|HA2R_HUMAN | | | | | | |
| | | HLA C | | | | | | |
| 385 | H2CAA26R | initation factor 4B [Homo sapiens] | gi\|288100 | 1 | 264 | 73 | 73 | H2CAA26 |
| | | >pir\|S12566\|S12566 translation initiation factor eIF- | | | | | | |
| | | 4B - human >sp\|P23588\|IF4B_HUMAN | | | | | | |
| | | EUKARYOTIC TRANSLATION INITIATION | | | | | | |
| | | FACTOR 4B (EIF-4B). Length = 611 | | | | | | |
| 386 | HTLIW74R | inosine-5′-monophosphate dehydrogenase | gi\|304517 | 2 | 652 | 95 | 95 | HTLIW74 |
| | | [Cricetulus griseus] >pir\|B31997\|B31997 IMP | | | | | | |
| | | dehydrogenase (EC 1.1.1.205) - Chinese hamster | | | | | | |
| | | >sp\|P12269\|IMD2_MESAU INOSINE-5′- | | | | | | |
| | | MONOPHOSPHATE DEHYDROGENASE 2 (EC | | | | | | |
| | | 1.1.1.205) (IMP DEHYDROGENASE 2) (IMPDH- | | | | | | |
| | | II) (IMPD 2). Le | | | | | | |
| 387 | HDTHW36R | | | 1 | 309 | | | HDTHW36 |
| 388 | HDPTT19R | | | 36 | 278 | | | HDPTT19 |
| 389 | HKBAC11R | | | 171 | 452 | | | HKBAC11 |
| 390 | HBGOU32R | longest open reading frame [Homo sapiens] | gnl\|PID\|e4346 | 1 | 231 | 80 | 80 | HBGOU32 |
| | | >sp\|Q14617\|Q14617 INTERFERON-INDUCIBLE | | | | | | |
| | | MRNA (CDNA 1-8). Length = 152 | | | | | | |
| 391 | HNTNC82R | Meis1-related protein 1b [Mus musculus] | gi\|1679672 | 1 | 438 | 98 | 98 | HNTNC82 |
| | | >gnl\|PID\|e330084 (AJ000507) Homeodomain | | | | | | |
| | | protein Meis2d [Mus musculus] Length = 470 | | | | | | |
| 392 | HMCIB16R | MHC class I histocompatibility antigen HLA-A3 | pir\|A02192\|HLHUA3 | 1 | 312 | 98 | 98 | HMCIB16 |
| | | alpha chain precursor - human | | | | | | |
| | | >sp\|P04439\|1A03_HUMAN HLA CLASS I | | | | | | |
| | | HISTOCOMPATIBILITY ANTIGEN, A-3 ALPHA | | | | | | |
| | | CHAIN PRECURSOR. >gi\|187622 MHC class I | | | | | | |
| | | antigen [Homo sapiens] {SUB 254-370} Length = | | | | | | |
| | | 370 | | | | | | |
| 393 | HAPNX90R | MHC HLA-DQ-beta cell surface glycoprotein | gi\|307255 | 227 | 376 | 100 | 100 | HAPNX90 |
| | | [Homo sapiens] >pir\|I55996\|I55996 MHC | | | | | | |
| | | HLA-DQ-beta cell surface glycoprotein - human | | | | | | |
| | | >sp\|Q30091\|Q30091 MHC CLASS II HLA-DQ- | | | | | | |
| | | BETA. Length = 261 | | | | | | |
| 394 | HSHAE55R | NF-kappa-B transcription factor subunit [Homo | gi\|307300 | 3 | 188 | 90 | 95 | HSHAE55 |
| | | sapiens] >pir\|I53719\|I53719 NF-kappa-B | | | | | | |
| | | transcription factor subunit - human | | | | | | |
| | | >sp\|E78680\|E78680 P65 SUBUNIT OF | | | | | | |
| | | TRANSCRIPTION FACTOR NF-KAPPAB. {SUB | | | | | | |
| | | 281-331} Length = 537 | | | | | | |
| 395 | HAJBZ28R | nucleolar autoantigen No55 [Homo sapiens] | gi\|1491809 | 2 | 316 | 98 | 100 | HAJBZ28 |
| | | >sp\|Q92791\|NO55_HUMAN NUCLEOLAR | | | | | | |
| | | AUTOANTIGEN NO55. Length = 437 | | | | | | |
| 396 | HAGGW13R | placenta protein 9 [unidentified] >gi\|179036 aldose | gi\|413094 | 1 | 147 | 75 | 78 | HAGGW13 |
| | | reductase (EC 1.1.1.21) [Homo sapiens] >gi\|178485 | | | | | | |
| | | aldose reductase [Homo sapiens] >gi\|178487 aldose | | | | | | |
| | | reductase (EC 1.1.1.21) [Homo sapiens] >gi\|178491 | | | | | | |
| | | aldose reductase [Homo sapiens] >gi\|28647 aldose | | | | | | |
| | | redu | | | | | | |
| 397 | HAHDV81R | plasma gelsolin [Homo sapiens] | gi\|736249 | 3 | 302 | 92 | 95 | HAHDV81 |
| | | >pir\|A03011\|FAHUP gelsolin precursor, plasma - | | | | | | |
| | | human >sp\|P06396\|GELS_HUMAN GELSOLIN | | | | | | |
| | | PRECURSOR, PLASMA (ACTIN- | | | | | | |
| | | DEPOLYMERIZING FACTOR) (ADF) (BREVIN) | | | | | | |
| | | (AGEL). >gnl\|PID\|e20565 plasma gelsolin (AA 49- | | | | | | |
| | | 117) [Homo sapiens] {SUB 49-11 | | | | | | |
| 398 | HACBP41R | plasma protease (C1) inhibitor precursor [Homo | gi\|179619 | 113 | 367 | 66 | 70 | HACBP41 |
| | | sapiens] Length = 500 | | | | | | |
| 399 | HANGC26R | plasma protease (C1) inhibitor precursor [Homo | gi\|179619 | 3 | 245 | 78 | 82 | HANGC26 |
| | | sapiens] Length = 500 | | | | | | |
| 400 | HESAN74R | platelet-derived growth factor receptor [Homo | gi\|189730 | 1 | 363 | 70 | 74 | HESAN74 |
| | | sapiens] >gi\|2107947 platelet-derived growth factor | | | | | | |
| | | type beta receptor [Homo sapiens] {SUB 547-568} | | | | | | |
| | | Length = 1106 | | | | | | |
| 401 | HWLMW20R | | | 1 | 408 | | | HWLMW20 |
| 402 | HAPNU02R | pulmonary surfactant apoprotein precursor [Homo | gi\|190565 | 1 | 435 | 100 | 100 | HAPNU02 |
| | | sapiens] Length = 248 | | | | | | |
| 403 | HOUGB18R | put. eEF-TU (aa 1-94) [Homo sapiens] >gi\|50799 | gi\|31110 | 20 | 202 | 71 | 73 | HOUGB18 |
| | | put. eEF-TU (aa 1-94) [Mus musculus] Length = 94 | | | | | | |
| 404 | HBAGQ35R | put. lamin A precursor (aa 1-702) [Homo sapiens] | gi\|34228 | 13 | 234 | 81 | 83 | HBAGQ35 |
| | | Length = 702 | | | | | | |
| 405 | HADME37R | pyruvate kinase (EC 2.7.1.40), muscle splice form | pir\|S64635\|S64635 | 16 | 135 | 100 | 100 | HADME37 |
| | | M1 - human Length = 531 | | | | | | |
| 406 | HAPQM68R | raf protein (aa 1-648) [Homo sapiens] | gi\|35842 | 53 | 427 | 99 | 99 | HAPQM68 |
| | | >pir\|A00637\|TVHUF6 protein kinase raf-1 (EC | | | | | | |
| | | 2.7.1.-) - human >sp\|P04049\|KRAF_HUMAN RAF | | | | | | |
| | | PROTO-ONCOGENE SERINE/THREONINE- | | | | | | |
| | | PROTEIN KINASE (EC 2.7.1.-) (RAF-1) (C-RAF). | | | | | | |
| | | >gi\|2257953 (AF006463) c-RAF homolog [Papio | | | | | | |
| | | hamadryas | | | | | | |
| 407 | HSLGI35R | ribosomal protein S28 [Homo sapiens] >gi\|337403 | gi\|1518637 | 3 | 158 | 93 | 93 | HSLGI35 |
| | | ribosomal protein S28 [Homo sapiens] >gi\|508266 | | | | | | |
| | | ribosomal protein S28 [Mus musculus] >gi\|57726 | | | | | | |
| | | ribosomal protein S28 [Rattus rattus] >gi\|4050094 | | | | | | |
| | | (AF110520) RPS28 [Mus musculus] | | | | | | |
| | | >pir\|JQ1170\|R3RT28 ribosomal p | | | | | | |
| 408 | HDPQN35R | signal recognition particle,72 kDa subunit [Canis | gi\|297768 | 2 | 325 | 93 | 95 | HDPQN35 |
| | | familiaris] >pir\|A40692\|A40692 signal recognition | | | | | | |
| | | particle 72K chain - dog Length = 671 | | | | | | |
| 409 | HAPNU41R | SP-A2 delta = surfactant protein {N-terminal, | bbs\|146432 | 3 | 308 | 100 | 100 | HAPNU41 |
| | | alternatvely spliced} [human, fetal lung explants, | | | | | | |
| | | Peptide Partial, 41 aa] [Homo sapiens] | | | | | | |
| | | >pir\|I64840\|I64840 SP-A2 delta - human (fragment) | | | | | | |
| | | >sp\|Q16139\|Q16139 SP-A2 DELTA (FRAG- | | | | | | |
| | | MENT). Length = 41 | | | | | | |
| 410 | HSYCT58R | tenascin [Homo sapiens] Length = 2199 | gi\|37227 | 2 | 148 | 100 | 100 | HSYCT58 |
| 411 | HFKLT54R | tissue-specific secretory protein [unidentified] | gi\|513467 | 3 | 392 | 84 | 84 | HFKLT54 |
| | | >gi\|818881 epididymal secretory protein precursor | | | | | | |
| | | [Pan troglodytes] >gi\|794071 epididymal secretory | | | | | | |
| | | protein 14.6 [Macaca fascicularis] >gi\|37477 orf | | | | | | |
| | | [Homo sapiens] >pir\|I53929\|I53929 epididymal | | | | | | |
| | | secretory pr | | | | | | |
| 412 | HTXNT90R | transfer RNA-Trp synthetase [Homo sapiens] | gi\|184657 | 3 | 521 | 100 | 100 | HTXNT90 |
| | | >gi\|30821 471 aa polypeptide (gamma2) [Homo | | | | | | |
| | | sapiens] >pir\|A41633\|A41706 tryptophan--tRNA | | | | | | |
| | | ligase (EC 6.1.1.2) - human >bbs\|179357 | | | | | | |
| | | tryptophanyl-tRNA synthetase, TrpRS {N-terminal, | | | | | | |
| | | alternatively spliced} {EC 6.1.1.2 | | | | | | |
| 413 | H6BSD14R | | | 123 | 539 | | | H6BSD14 |
| 414 | H6EEC47R | | | 1 | 90 | | | H6EEC47 |
| 415 | HACBQ15R | | | 279 | 452 | | | HACBQ15 |
| 416 | HADTH59R | | | 2 | 208 | | | HADTH59 |
| 417 | HAIAA21R | | | 1 | 144 | | | HAIAA21 |
| 418 | HANGG63R | | | 3 | 182 | | | HANGG63 |
| 419 | HAPAK90R | | | 66 | 227 | | | HAPAK90 |
| 420 | HAPBH25R | | | 318 | 506 | | | HAPBH25 |
| 421 | HAPBP34R | | | 3 | 236 | | | HAPBP34 |
| 422 | HAPBV57R | | | 180 | 380 | | | HAPBV57 |
| 423 | HAPOL49R | | | 80 | 316 | | | HAPOL49 |
| 424 | HAPQO76R | | | 3 | 350 | | | HAPQO76 |
| 425 | HBAFB37R | | | 247 | 417 | | | HBAFB37 |
| 426 | HBKDI63R | | | 140 | 259 | | | HBKDI63 |
| 427 | HCFLU89R | | | 298 | 411 | | | HCFLU89 |
| 428 | HCLCX30R | | | 92 | 376 | | | HCLCX30 |
| 429 | HCUCD74R | | | 2 | 91 | | | HCUCD74 |
| 430 | HDTFW96R | | | 63 | 290 | | | HDTFW96 |
| 431 | HDTLW91R | | | 406 | 588 | | | HDTLW91 |
| 432 | HE9GW86R | | | 59 | 289 | | | HE9GW86 |
| 433 | HFACI43R | | | 1 | 123 | | | HFACI43 |
| 434 | HHBGW74R | | | 196 | 330 | | | HHBGW74 |
| 435 | HHFLJ48R | | | 3 | 323 | | | HHFLJ48 |
| 436 | HHFLJ50R | | | 240 | 425 | | | HHFLJ50 |
| 437 | HKMMF86R | | | 1 | 75 | | | HKMMF86 |
| 438 | HMCIB02R | | | 212 | 424 | | | HMCIB02 |
| 439 | HOEKC43R | | | 1 | 381 | | | HOEKC43 |
| 440 | HPJCZ62R | | | 34 | 231 | | | HPJCZ62 |
| 441 | HPJDY23R | | | 37 | 84 | | | HPJDY23 |
| 442 | HSXEN17R | | | 244 | 354 | | | HSXEN17 |
| 443 | HMCGG17R | vacuolar H+-ATPase B subunit [Gallus gallus] | gi\|675489 | 1 | 273 | 100 | 100 | HMCGG17 |
| | | Length = 453 | | | | | | |

[0046] The first column of Table 1 shows the “SEQ ID NO:” for each of the 443 lung cancer antigen polynucleotide sequences of the invention.

[0047] The second column in Table 1, provides a unique “Sequence/Contig ID” identification for each lung and/or lung cancer associated sequence. The third column in Table 1, “Gene Name,” provides a putative identification of the gene based on the sequence similarity of its translation product to an amino acid sequence found in a publicly accessible gene database, such as GenBank (NCBI). The great majority of the cDNA sequences reported in Table 1 are unrelated to any sequences previously described in the literature. The fourth column, in Table 1, “Overlap,” provides the database accession no. for the database sequence having similarity. The fifth and sixth columns in Table 1 provide the location (nucleotide position nos. within the contig), “Start” and “End”, in the polynucleotide sequence “SEQ ID NO:X” that delineate the preferred ORF shown in the sequence listing as SEQ ID NO:Y. In one embodiment, the invention provides a protein comprising, or alternatively consisting of, a polypeptide encoded by the portion of SEQ ID NO:X delineated by the nucleotide position nos. “Start” and “End”. Also provided are polynucleotides encoding such proteins and the complementary strand thereto. The seventh and eighth columns provide the “% Id” (percent identity) and “% Si” (percent similarity) observed between the aligned sequence segments of the translation product of SEQ ID NO:X and the database sequence.

[0048] The ninth column of Table 1 provides a unique “Clone ID” for a clone related to each contig sequence. This clone ID references the cDNA clone which contains at least the 5′ most sequence of the assembled contig and at least a portion of SEQ ID NO:X was determined by directly sequencing the referenced clone. The reference clone may have more sequence than described in the sequence listing or the clone may have less. In the vast majority of cases, however, the clone is believed to encode a full-length polypeptide. In the case where a clone is not full-length, a full-length cDNA can be obtained by methods described elsewhere herein.

[0049] Table 3 indicates public ESTs, of which at least one, two, three, four, five, ten, or more of any one or more of these public ESTs are optionally excluded from the invention.

[0050] SEQ ID NO:X (where X may be any of the polynucleotide sequences disclosed in the sequence listing as SEQ ID NO:1 through SEQ ID NO:443) and the translated SEQ ID NO:Y (where Y may be any of the polypeptide sequences disclosed in the sequence listing as SEQ ID NO:444 through SEQ ID NO:886) are sufficiently accurate and otherwise suitable for a variety of uses well known in the art and decribed further below. For instance, SEQ ID NO:X has uses including, but not limited to, in designing nucleic acid hybridization probes that will detect nucleic acid sequences contained in SEQ ID NO:X or the related cDNA clone contained in a library deposited with the ATCC. These probes will also hybridize to nucleic acid molecules in biological samples, thereby enabling immediate applications in chromosome mapping, linkage analysis, tissue identification and/or typing, and a variety of forensic and diagnostic methods of the invention. Similarly, polypeptides identified from SEQ ID NO:Y have uses that include, but are not limited to, generating antibodies which bind specifically to the lung cancer antigen polypeptides, or fragments thereof, and/or to the lung cancer antigen polypeptides encoded by the cDNA clones identified in Table 1.

[0051] Nevertheless, DNA sequences generated by sequencing reactions can contain sequencing errors. The errors exist as misidentified nucleotides, or as insertions or deletions of nucleotides in the generated DNA sequence. The erroneously inserted or deleted nucleotides cause frame shifts in the reading frames of the predicted amino acid sequence. In these cases, the predicted amino acid sequence diverges from the actual amino acid sequence, even though the generated DNA sequence may be greater than 99.9% identical to the actual DNA sequence (for example, one base insertion or deletion in an open reading frame of over 1000 bases).

[0052] Accordingly, for those applications requiring precision in the nucleotide sequence or the amino acid sequence, the present invention provides not only the generated nucleotide sequence identified as SEQ ID NO:X, the predicted translated amino acid sequence identified as SEQ ID NO:Y, but also a sample of plasmid DNA containing the related cDNA clone (deposited with the ATCC, as set forth in Table 1). The nucleotide sequence of each deposited clone can readily be determined by sequencing the deposited clone in accordance with known methods. Further, techniques known in the art can be used to verify the nucleotide sequences of SEQ ID NO:X.

[0053] The predicted amino acid sequence can then be verified from such deposits. Moreover, the amino acid sequence of the protein encoded by a particular clone can also be directly determined by peptide sequencing or by expressing the protein in a suitable host cell containing the deposited human cDNA, collecting the protein, and determining its sequence.

[0054] The present invention also relates to vectors or plasmids which include such DNA sequences, as well as the use of the DNA sequences. The material deposited with the ATCC on:

TABLE 2

| ATCC Deposits | Deposit Date | ATCC Designation Number |
|---|---|---|
| LP01, LP02, LP03, LP04, LP05, | May-20-97 | 209059, 209060, 209061, 209062, |
| LP06, LP07, LP08, LP09, LP10, | | 209063, 209064, 209065, 209066, |
| LP11, | | 209067, 209068, 209069 |
| LP12 | Jan-12-98 | 209579 |
| LP13 | Jan-12-98 | 209578 |
| LP14 | Jul-16-98 | 203067 |
| LP15 | Jul-16-98 | 203068 |
| LP16 | Feb-1-99 | 203609 |
| LP17 | Feb-1-99 | 203610 |
| LP20 | Nov-17-98 | 203485 |
| LP21 | Jun-18-99 | PTA-252 |
| LP22 | Jun-18-99 | PTA-253 |
| LP23 | Dec-22-99 | PTA-1081 |

[0055] each is a mixture of cDNA clones derived from a variety of human tissue and cloned in either a plasmid vector or a phage vector, as shown in Table 5. These deposits are referred to as “the deposits” herein. The tissues from which the clones were derived are listed in Table 5, and the vector in which the cDNA is contained is also indicated in Table 5. The deposited material includes the cDNA clones which were partially sequenced and are related to the SEQ ID NO:X described in Table 1 (column 9). Thus, a clone which is isolatable from the ATCC Deposits by use of a sequence listed as SEQ ID NO:X may include the entire coding region of a human gene or in other cases such clone may include a substantial portion of the coding region of a human gene. Although the sequence listing lists only a portion of the DNA sequence in a clone included in the ATCC Deposits, it is well within the ability of one skilled in the art to complete the sequence of the DNA included in a clone isolatable from the ATCC Deposits by use of a sequence (or portion thereof) listed in Table 1 by procedures hereinafter further described, and others apparent to those skilled in the art.

[0056] Also provided in Table 5 is the name of the vector which contains the cDNA clone. Each vector is routinely used in the art. The following additional information is provided for convenience.

[0057] Vectors Lambda Zap (U.S. Pat. Nos. 5,128,256 and 5,286,636), Uni-Zap XR (U.S. Pat. Nos. 5,128, 256 and 5,286,636), Zap Express (U.S. Pat. Nos. 5,128,256 and 5,286,636), pBluescript (pBS) (Short, J. M. et al., Nucleic Acids Res. 16:7583-7600 (1988); Alting-Mees, M. A. and Short, J. M.,Nucleic Acids Res. 17:9494 (1989)) and pBK (Alting-Mees, M. A. et al., Strategies 5:58-61 (1992)) are commercially available from Stratagene Cloning Systems, Inc., 11011 N. Torrey Pines Road, La Jolla, Calif., 92037. pBS contains an ampicillin resistance gene and pBK contains a neomycin resistance gene. Phagemid pBS may be excised from the Lambda Zap and Uni-Zap XR vectors, and phagemid pBK may be excised from the Zap Express vector. Both phagemids may be transformed into E. coli strain XL-1 Blue, also available from Stratagene.

[0058] Vectors pSport1, pCMVSport 1.0, pCMVSport 2.0 and pCMVSport 3.0, were obtained from Life Technologies, Inc., P. O. Box 6009, Gaithersburg, Md. 20897. All Sport vectors contain an ampicillin resistance gene and may be transformed into E. coli strain DH10B, also available from Life Technologies. See, for instance, Gruber, C. E., et al., Focus 15:59 (1993). Vector lafmid BA (Bento Soares, Columbia University, New York, N.Y.) contains an ampicillin resistance gene and can be transformed into E. coli strain XL-1 Blue. Vector pCR®2.1, which is available from Invitrogen, 1600 Faraday Avenue, Carlsbad, Calif. 92008, contains an ampicillin resistance gene and may be transformed into E. coli strain DH10B, available from Life Technologies. See, for instance, Clark, J. M., Nuc. Acids Res. 16:9677-9686 (1988) and Mead, D. et al., Bio/Technology 9: (1991).

[0059] The present invention also relates to the genes corresponding to SEQ ID NO:X, SEQ ID NO:Y, and/or the cDNA contained in a deposited cDNA clone. The corresponding gene can be isolated in accordance with known methods using the sequence information disclosed herein. Such methods include, but are not limited to, preparing probes or primers from the disclosed sequence and identifying or amplifying the corresponding gene from appropriate sources of genomic material.

[0060] Also provided in the present invention are allelic variants, orthologs, and/or species homologs. Procedures known in the art can be used to obtain full-length genes, allelic variants, splice variants, full-length coding portions, orthologs, and/or species homologs of genes corresponding to SEQ ID NO:X, SEQ ID NO:Y, and/or the cDNA contained in the related cDNA clone in the deposit, using information from the sequences disclosed herein or the clones deposited with the ATCC. For example, allelic variants and/or species homologs may be isolated and identified by making suitable probes or primers from the sequences provided herein and screening a suitable nucleic acid source for allelic variants and/or the desired homologue.

[0061] The present invention provides a polynucleotide comprising, or alternatively consisting of, the nucleic acid sequence of SEQ ID NO:X, and/or the related cDNA clone (See, e.g., columns 1 and 9 of Table 1). The present invention also provides a polypeptide comprising, or alternatively, consisting of, the polypeptide sequence of SEQ ID NO:Y, a polypeptide encoded by SEQ ID NO:X, and/or a polypeptide encoded by the cDNA in the related CDNA clone contained in a deposited library. Polynucleotides encoding a polypeptide comprising, or alternatively consisting of, the polypeptide sequence of SEQ ID NO:Y, a polypeptide encoded by SEQ ID NO:X, and/or a polypeptide encoded by the the dDNA in the related cDNA clone contained in a deposited library, are also encompassed by the invention. The present invention further encompasses a polynucleotide comprising, or alternatively consisting of, the complement of the nucleic acid sequence of SEQ ID NO:X, and/or the complement of the coding strand of the related cDNA clone contained in a deposited library.

[0062] Many polynucleotide sequences, such as EST sequences, are publicly available and accessible through sequence databases and may have been publicly available prior to conception of the present invention. Preferably, such related polynucleotides are specifically excluded from the scope of the present invention. To list every related sequence would unduly burden the disclosure of this application. Accordingly, for each “Contig Id” listed in the first column of Table 3, preferably excluded are one or more polynucleotides comprising a nucleotide sequence described in the second column of Table 3 by the general formula of a-b, each of which are uniquely defined for the SEQ ID NO:X corresponding to that Contig Id in Table 1. Additionally, specific embodiments are directed to polynucleotide sequences excluding at least one, two, three, four, five, ten, or more of the specific polynucleotide sequences referenced by the Genbank Accession No. for each Contig Id which may be included in column 3 of Table 3. In no way is this listing meant to encompass all of the sequences which may be excluded by the general formula, it is just a representative example.

TABLE 3

| Sequence/ | | | |
|---|---|---|---|
| Contig ID | General formula | Genbank Accession No. | |
| 507002 | Preferably excluded from the present invention are one or | | |
| | more polynucleotides comprising a nucleotide sequence | | |
| | described by the general formula of a-b, where a is any | | |
| | integer between 1 to 1566 of SEQ ID NO:1, b is an integer of | | |
| | of 15 to 1580, where both a and b correspond to the positions of | | |
| | of nucleotide residues shown in SEQ ID NO:1, and where b is | | |
| | greater than or equal to a +14. | | |
| 508935 | Preferably excluded from the present invention are one or | | |
| | more polynucleotides comprising a nucleotide sequence | | |
| | described by the general formula of a-b, where a is any | | |
| | integer between 1 to 2428 of SEQ ID NO:2, b is an integer | | |
| | of 15 to 2442, where both a and b correspond to the positions | | |
| | of nucleotide residues shown in SEQ ID NO:2, and where b is | | |
| | greater than or equal to a +14. | | |
| 518959 | Preferably excluded from the present invention are one or | R12691, R16433, W06913, AA253226, AA458465 | |
| more polynucleotides comprising a nucleotide sequence | | | |
| | described by the general formula of a-b, where a is any | | |
| | integer between 1 to 1773 of SEQ ID NO:3, b is an integer | | |
| | of 15 to 1787, where both a and b correspond to the positions | | |
| | of nucleotide residues shown in SEQ ID NO:3, and where b is | | |
| | greater than or equal to a +14. | | |
| 539756 | Preferably excluded from the present invention are one or | T85355, T85452, R01748, R01749, R21683, R76830, R76831, R81140, | |
| | more polynucleotides comprising a nucleotide sequence | R81139, N41431, N99543, W92271 | |
| | described by the general formula of a-b, where a is any | | |
| | integer between 1 to 832 of SEQ ID NO:4, b is an integer | | |
| | of 15 to 846, where both a and b correspond to the positions | | |
| | of nucleotide residues shown in SEQ ID NO:4, and where b is | | |
| | greater than or equal to a +14. | | |
| 540125 | Preferably excluded from the present invention are one or | N30606, N40661, N41850, N42208, N64348, AA261980 | |
| | more polynucleotides comprising a nucleotide sequence | | |
| | described by the general formula of a-b, where a is any | | |
| | integer between 1 to 1263 of SEQ ID NO:5, b is an integer | | |
| | of 15 to 1277, where both a and b correspond to the positions | | |
| | of nucleotide residues shown in SEQ ID NO:5, and where b | | |
| | is greater than or equal to a +14. | | |
| 540275 | Preferably excluded from the present invention are one or | T58888, T58950, T77750, T77751, R11911, R02521, R14197, R15120, | |
| | more polynucleotides comprising a nucleotide sequence | R17948, R22687, R37480, R39103, R41544, R43393, R43438, R41544, | |
| | described by the general formula of a-b, where a is any | R43393, R43438, H45141, R83378, R83819, R86096, H49887, H65432, | |
| | integer between 1 to 2188 of SEQ ID NO:6, b is an integer | H65433, H94973, 1195493, H65433, H98864, 1199146, N24395, N27550, | |
| | of 15 to 2202, where both a and b correspond to the positions | N40365, N46111, N47507, N47508, N55276, N62977, N76885, W45533, | |
| | of nucleotide residues shown in SEQ ID NO:6, and where b | W45520, W67533, W67534, W80460, N89761, AA011245, AA100471, | |
| | is greater than or equal to a +14. | A101453, AA135125, AA135238, AA204704, AA227873, AA227874 | |
| 540331 | Preferably excluded from the present invention are one or | T60064, T62000, T39218, T39235, T39248, T63485, T63560, T63653, T63834, | |
| | more polynucleotides comprising a nucleotide sequence | T63850, T63908, T63969, T92745, T92902, T94295, T94457, T94546 | |
| | described by the general formula of a-b, where a is any | | |
| | integer between 1 to 1284 of SEQ ID NO:7, b is an integer | | |
| | of 15 to 1298, where both a and b correspond to the positions | | |
| | of nucleotide residues shown in SEQ ID NO:7, and where b | | |
| | is greater than or equal to a +14. | | |
| 540955 | Preferably excluded from the present invention are one or | T47346, T39490, T49501, T53352, T53353, T58751, T59830, T62508, T70053, | |
| | more polynucleotides comprising a nucleotide sequence | T70119, T71663, T71816, T92710, T92786, T70242, T87877, T87967, T89395, | |
| | described by the general formula of a-b, where a is any | T89753, R00830, R01486, R22448, R22500, R24884, R53792, R68690, | |
| | integer between 1 to 1749 of SEQ ID NO:8, b is an integer | R68745, R70643, R81546, R81545, R81829, R82028, R82074, H01094, | |
| | of 15 to 1763, where both a and b correspond to the positions | H03335, H12560, 1113083, H13287, H70273, H95157, H95199, N22040, | |
| | of nucleotide residues shown in SEQ ID NO:8, and where b | N26996, N40117, N53786, N54556, N69444, N73148, N76636, N93982, | |
| | is greater than or equal to a +14. | W52688, W74093, W79383, W94662, W96029, AA001255, AA001108, | |
| | | A002260, AA001637, AA010621, AA010622, AA031960, AA032042, | |
| | | A057472, AA069313, AA074511, AA100094, AA224261 | |
| 541251 | Preferably excluded from the present invention are one or | T89145, T89238, T66188, T79629, T79714, R06893, R06935, R17707, | |
| | more polynucleotides comprising a nucleotide sequence | R33911, R59938, R59939, H70419, H88949, H89182, H88949, H99641, | |
| | described by the general formula of a-b, where a is any | N24430, N93479, W21497, AA047879, AA069880, AA070006, AA113048, | |
| | integer between 1 to 2141 of SEQ ID NO:9, b is an integer of | A113388, AA112639, AA127456, AA169143, AA169235, AA182036, | |
| | 15 to 2155, where both a and b correspond to the positions of | A188210, AA186357, AA188395, AA192379, AA197275, AA223748, | |
| | nucleotide residues shown in SEQ ID NO:9, and where b | A464825 | |
| | is greater than or equal to a +14. | | |
| 541978 | Preferably excluded from the present invention are one or | | |
| | more polynucleotides comprising a nucleotide sequence | | |
| | described by the general formula of a-b, where a is any | | |
| | integer between 1 to 1194 of SEQ ID NO:10, b is an integer | | |
| | of 15 to 1208, where both a and b correspond to the positions | | |
| | of nucleotide residues shown in SEQ ID NO:10, and where b | | |
| | is greater than or equal to a +14. | | |
| 547680 | Preferably excluded from the present invention are one or | T49230, T48210, T49231, R87539, W02155, W02798, W07585, W30953, | |
| | more polynucleotides comprising a nucleotide sequence | W32489, W47384, W47256, W68528, W68814, W70219, W70220, W78133, | |
| | described by the general formula of a-b, where a is any | W79471, W81199, W86008, W95376, AA027019, AA040292, AA040533, | |
| | integer between 1 to 2298 of SEQ ID NO:11, b is an integer | AA040756, AA041210, AA043912, AA157956, AA186594, AA459745, | |
| | of 15 to 2312, where both a and b correspond to the positions | A461327 | |
| | of nucleotide residues shown in SEQ ID NO:11, and where b | | |
| | is greater than or equal to a +14. | | |
| 547705 | Preferably excluded from the present invention are one or | T70761, R11269, H57226, N28016, N41991, W31920, AA224454 | |
| | more polynucleotides comprising a nucleotide sequence | | |
| | described by the general formula of a-b, where a is any | | |
| | integer between 1 to 901 of SEQ ID NO:12, b is an integer of | | |
| | 15 to 915, where both a and b correspond to the positions of | | |
| | nucleotide residues shown in SEQ ID NO:12, and where b | | |
| | is greater than or equal to a +14. | | |
| 549763 | Preferably excluded from the present invention are one or | T77113, T86571, T86749, H47480, R89205, H56994, H61812, N20326, | |
| | more polynucleotides comprising a nucleotide sequence | N27600, N31373, N36157, N74455, N93384, W03169, W25403, W77860, | |
| | described by the general formula of a-b, where a is any | AA029438, AA029503, AA052974, AA053468, AA053190, AA054520, | |
| | integer between 1 to 1438 of SEQ ID NO:13, b is an integer | AA057649, AA057748, AA071554, AA113040, AA112548, AA112612, | |
| | of 15 to 1452, where both a and b correspond to the positions | AA179799, AA227845, AA227846 | |
| | of nucleotide residues shown in SEQ ID NO:13, and where b | | |
| | is greater than or equal to a +14. | | |
| 549819 | Preferably excluded from the present invention are one or | | |
| | more polynucleotides comprising a nucleotide sequence | | |
| | described by the general formula of a-b, where a is any | | |
| | integer between 1 to 427 of SEQ ID NO:14, b is an integer of | | |
| | 15 to 441, where both a and b correspond to the positions of | | |
| | nucleotide residues shown in SEQ ID NO:14, and where b | | |
| | is greater than or equal to a +14. | | |
| 549820 | Preferably excluded from the present invention are one or | | |
| | more polynucleotides comprising a nucleotide sequence | | |
| | described by the general formula of a-b, where a is any | | |
| | integer between 1 to 510 of SEQ ID NO:15, b is an integer of | | |
| | 15 to 524, where both a and b correspond to the positions of | | |
| | nucleotide residues shown in SEQ ID NO:15, and where b | | |
| | is greater than or equal to a +14. | | |
| 549944 | Preferably excluded from the present invention are one or | W05270, AA193211 | |
| | more polynucleotides comprising a nucleotide sequence | | |
| | described by the general formula of a-b, where a is any | | |
| | integer between 1 to 2418 of SEQ ID NO:16, b is an integer | | |
| | of 15 to 2432, where both a and b correspond to the positions | | |
| | of nucleotide residues shown in SEQ ID NO:16, and where b | | |
| | is is greater than or equal to a +14. | | |
| 551426 | Preferably excluded from the present invention are one or | | |
| | more polynucleotides comprising a nucleotide sequence | | |
| | described by the general formula of a-b, where a is any | | |
| | integer between 1 to 358 of SEQ ID NO:17, b is an integer of | | |
| | 15 to 372, where both a and b correspond to the positions of | | |
| | nucleotide residues shown in SEQ ID NO:17, and where b | | |
| | is greater than or equal to a +14. | | |
| 552182 | Preferably excluded from the present invention are one or | | |
| | more polynucleotides comprising a nucleotide sequence | | |
| | described by the general formula of a-b, where a is any | | |
| | integer between 1 to 915 of SEQ ID NO:18, b is an integer of | | |
| | 15 to 929, where both a and b correspond to the positions of | | |
| | nucleotide residues shown in SEQ ID NO:18, and where b | | |
| | is greater than or equal to a +14. | | |
| 552540 | Preferably excluded from the present invention are one or | | |
| | more polynucleotides comprising a nucleotide sequence | | |
| | described by the general formula of a-b, where a is any | | |
| | integer between 1 to 402 of SEQ ID NO:19, b is an integer of | | |
| | 15 to 416, where both a and b correspond to the positions of | | |
| | nucleotide residues shown in SEQ ID NO:19, and where b | | |
| | is greater than or equal to a +14. | | |
| 553367 | Preferably excluded from the present invention are one or | R46353, R46444, R49217, R49217, R69441, R70422, 1127076, R85073, | |
| | more polynucleotides comprising a nucleotide sequence N69960, N93506, W21318, W92281 | | |
| | described by the general formula of a-b, where a is any | | |
| | integer between 1 to 1839 of SEQ ID NO:20, b is an integer | | |
| | of 15 to 1853, where both a and b correspond to the positions | | |
| | of nucleotide residues shown in SEQ ID NO:20, and where b | | |
| | is greater than or equal to a +14. | | |
| 554326 | Preferably excluded from the present invention are one or | T64826, R10203, T97648, T97682, H24794, H38748, H84580, N42355 | |
| | more polynucleotides comprising a nucleotide sequence | | |
| | described by the general formula of a-b, where a is any | | |
| | integer between 1 to 1693 of SEQ ID NO:21, b is an integer | | |
| | of 15 to 1707, where both a and b correspond to the positions | | |
| | of nucleotide residues shown in SEQ ID NO:21, and where b | | |
| | is greater than or equal to a +14. | | |
| 554657 | Preferably excluded from the present invention are one or | T54995, T55161, T57268, R08423, R99052, R99250, H60049, H63552, | |
| | more polynucleotides comprising a nucleotide sequence | H63597, H67322, H68531, N36577, N51896, N55541, N62719, N73182, | |
| | described by the general formula of a-b, where a is any | N78443, N78711, W32492, W37491, W37385, W81233, W81269, AA025552, | |
| | integer between 1 to 856 of SEQ ID NO:22, b is an integer of | A025653, AA099004, AA099073, AA128876, AA155680, AA155970, | |
| | 15 to 870, where both a and b correspond to the positions of | A159986, AA159987, AA176848, AA232955, AA232999, AA233045, | |
| | nucleotide residues shown in SEQ ID NO:22, and where b | A464479 | |
| | is greater than or equal to a +14. | | |
| 556156 | Preferably excluded from the present invention are one or | R11164, R12444, R15118, R24789, H00898, N29154, N42711, W00889, | |
| | more polynucleotides comprising a nucleotide sequence | W17263, W44321, AAOOS 179, AA10006S, AA111892, AA158702, | |
| | described by the general formula of a-b, where a is any | A158780, AA158829 | |
| | integer between 1 to 640 of SEQ ID NO:23, b is an integer of | | |
| | 15 to 654, where both a and b correspond to the positions of | | |
| | nucleotide residues shown in SEQ ID NO:23, and where b | | |
| | is greater than or equal to a +14. | | |
| 557747 | Preferably excluded from the present invention are one or | T61816, T67403, T73342, T73411, T89475, T89568, H47837, H47838, | |
| | more polynucleotides comprising a nucleotide sequence | H61865, N54494, N63924, W89198 | |
| | described by the general formula of a-b, where a is any | | |
| | integer between 1 to 1386 of SEQ ID NO:24, b is an integer | | |
| | of 15 to 1400, where both a and b correspond to the positions | | |
| | of nucleotide residues shown in SEQ ID NO:24, and where b | | |
| | is greater than or equal to a +14. | | |
| 558599 | Preferably excluded from the present invention are one or | T71049, T71118, T95493, T99242, T99287, H93555, H93556, N39552, | |
| | more polynucleotides comprising a nucleotide sequence | N45356, N53827, N58306, N58495, N68310, N69477, N73323, N74608, | |
| | described by the general formula of a-b, where a is any | N77672, N78084, W00883, N90969, AA009570, AA081234, AA128611, | |
| | integer between 1 to 629 of SEQ ID NO:25, b is an integer of | AA128612, AA130716, AA130801, AA132483, AA132572, AA132932, | |
| | 15 to 643, where both a and b correspond to the positions of | AA147273, AA147330, AA169473, AA196031, AA196060 | |
| | nucleotide residues shown in SEQ ID NO:25, and where b | | |
| | is greater than or equal to a +14. | | |
| 572403 | Preferably excluded from the present invention are one or | | |
| | more polynucleotides comprising a nucleotide sequence | | |
| | described by the general formula of a-b, where a is any | | |
| | integer between 1 to 1117 of SEQ ID NO:26, b is an integer | | |
| | of 15 to 1131, where both a and b correspond to the positions | | |
| | of nucleotide residues shown in SEQ ID NO:26, and where b | | |
| | is greater than or equal to a +14. | | |
| 573366 | Preferably excluded from the present invention are one or | | |
| | more polynucleotides comprising a nucleotide sequence | | |
| | described by the general formula of a-b, where a is any | | |
| | integer between 1 to 150 of SEQ ID NO:27, b is an integer of | | |
| | 15 to 164, where both a and b correspond to the positions of | | |
| | nucleotide residues shown in SEQ ID NO:27, and where b | | |
| | is greater than or equal to a +14. | | |
| 573986 | Preferably excluded from the present invention are one or | | |
| | more polynucleotides comprising a nucleotide sequence | | |
| | described by the general formula of a-b, where a is any | | |
| | integer between 1 to 646 of SEQ ID NO:28, b is an integer of | | |
| | 15 to 660, where both a and b correspond to the positions of | | |
| | nucleotide residues shown in SEQ ID NO:28, and where b | | |
| | is greater than or equal to a +14. | | |
| 575435 | Preferably excluded from the present invention are one or | T39164, T39174, T40441, T40449, T40455, T51400, T69999, T93268, T94124, | |
| | more polynucleotides comprising a nucleotide sequence | T94213, T94325, T94678, T96580, T96579, T98 149, T90974, R08466, T97330, | |
| | described by the general formula of a-b, where a is any | R01057, R21527, R21631, R28044, R32284, R33571, R33673, R40061, | |
| | integer between 1 to 3122 of SEQ ID NO:29, b is an integer | R44440, R44440, R55126, R55173, R63491, R63492, R64700, R68535, | |
| | of 15 to 3136, where both a and b correspond to the positions | R72421, R72465, R74196, R77928, R78031, R80572, R82486, R82538, | |
| | of nucleotide residues shown in SEQ ID NO:29, and where b | H15529, H15586, H20497, H20783, H21578, H25948, H25983, H42024, | |
| | is greater than or equal to a +14. | H42475, H42731, H43022, H43458, H47778, H48123, R88743, R89796, | |
| | | R90999, R93140, R93577, R93578, H48221, H48313, H53603, H54320, | |
| | | H54458, H57514, H57515, H58276, H58669, H62236; H64556, H64657, | |
| | | H68468, H68832, H73763, H74146, H79745, H79746, H79951, H79952, | |
| | | H88625, H89320, H89321, H64556, H99470, N20526, N20609, N21014, | |
| | | N22983, N26530, N28451, N29225, N30281, N31609, N32687, N34439, | |
| | | N35641, N42003, N42669, N46265, N46266, N63160, N68956, N76751, | |
| | | N79616, N91859, N91867, N91875, N93308, W00656, W02210, W05662, | |
| | | W19094, W19690, W19766, W20234, W23909, W23920, W23766, W24656, | |
| | | W25160, W32603, W32899, W35295, W37538, W37539, W61273, W61274, | |
| | | W61286, W65351, W69441, W69454, W69524, W69538, W69984, W72634, | |
| | | W88520, W90420, W93058, W93181, W93652, W93769, W92524, W95223, | |
| | | N90036, N90596, N91354, AA004315, AA005187, AA010768, AA011049, | |
| | | AA025845, AA028943, AA028944, AA036885, AA043676, AA044019, | |
| | | AA044194, AA044633, AA044760, AA045805, AA045872, AA046059, | |
| | | AA046185, AA053688, AA055602, AA058395, AA069616, AA070803, | |
| | | AA070877, AA076618, AA076619, AA081635, AA086013, AA086001, | |
| | | AA086108, AA088405, AA088528, AA098990, AA099052, AA098968, | |
| | | AA099486, AA112997, AA134382, AA134394, AA132038, AA131966, | |
| | | AA135178, AA135219, AA135352, AA135368, AA136149, AA136227, | |
| | | AA142955, AA147754, AA148934, AA148935, AA150462, AA161240, | |
| | | AA159691, AA159622, AA167108, AA167305, AA169502, AA176422, | |
| | | AA178843, AA180747, AA182407, AA182750, AA192405, AA192259, | |
| | | AA193226, AA194713, AA194777, AA253456, AA250911, AA463349, | |
| | | AA463448, AA463857 | |
| 584341 | Preferably excluded from the present invention are one or | T57793, T60105, T60148, T60207, T39185, T62531, T62548, T62606, T63248, | |
| | more polynucleotides comprising a nucleotide sequence | T63308, T63963, T64488, T64631, T65789, T65906, T65911, T70024, T72012, | |
| | described by the general formula of a-b, where a is any | T82355, T91763, T92526, T93717, T94845, T94890, T96181, H64702, | |
| | integer between 1 to 2234 of SEQ ID NO:30, b is an integer | H65194, H65194 | |
| | of 15 to 2248, where both a and b correspond to the positions | | |
| | of nucleotide residues shown in SEQ ID NO:30, and where b | | |
| | is greater than or equal to a +14. | | |
| 584435 | Preferably excluded from the present invention are one or | R37836, R37922, R97973, R97974, H57703, H65855, H65859, H65860, | |
| | more polynucleotides comprising a nucleotide sequence | H70124, 1170125, 1184404, N26402, N74594, W02493, AA054124, AA054169, | |
| | described by the general formula of a-b, where a is any | AA054189, AA115229, AA132090, AA132191 | |
| | integer between 1 to 2033 of SEQ ID NO:31, b is an integer | | |
| of 15 to 2047, where both a and b correspond to the positions | | | |
| of nucleotide residues shown in SEQ ID NO:31, and where b | | | |
| is greater than or equal to a +14. | | | |
| 585187 | Preferably excluded from the present invention are one or | | |
| | more polynucleotides comprising a nucleotide sequence | | |
| | described by the general formula of a-b, where a is any | | |
| | integer between 1 to 1821 of SEQ ID NO:32, b is an integer | | |
| | of 15 to 1835, where both a and b correspond to the positions | | |
| of nucleotide residues shown in SEQ ID NO:32, and where b | | | |
| | is greater than or equal to a +14. | | |
| 585658 | Preferably excluded from the present invention are one or | T66734, R14942, AA171576, AA196708 | |
| | more polynucleotides comprising a nucleotide sequence | | |
| | described by the general formula of a-b, where a is any | | |
| | integer between 1 to 1285 of SEQ ID NO:33, b is an integer | | |
| | of 15 to 1299, where both a and b correspond to the positions | | |
| | of nucleotide residues shown in SEQ ID NO:33, and where b | | |
| | is greater than or equal to a +14. | | |
| 585693 | Preferably excluded from the present invention are one or | T63022, T72992, T73117, R08174, T95097, T95197, T96940, T97049, | |
| | more polynucleotides comprising a nucleotide sequence | R22071, R22459, R26391, R33251, R36336, R53795, R68262, R68293, | |
| | described by the general formula of a-b, where a is any | R76264, R78125, R78126, R82269, R82381, H01353, R95875, R95876, | |
| | integer between 1 to 3326 of SEQ ID NO:34, b is an integer | H57149, H57223, N30812, N41586, N53545, N76004, W04423, W93076, | |
| | of 15 to 3340, where both a and b correspond to the positions | W93075, AA002005, AA001726, AA035777, AA056355, AA082477, | |
| | of nucleotide residues shown in SEQ ID NO:34, and where b | AA151818, AA151817, AA181092, AA181110, AA181062, AA181063, | |
| | is greater than or equal to a +14. | AA458728 | |
| 585701 | Preferably excluded from the present invention are one or | | |
| | more polynucleotides comprising a nucleotide sequence | | |
| | described by the general formula of a-b, where a is any | | |
| | integer between 1 to 1476 of SEQ ID NO:35, b is an integer | | |
| | of 15 to 1490, where both a and b correspond to the positions | | |
| | of nucleotide residues shown in SEQ ID NO:35, and where b | | |
| | is greater than or equal to a +14. | | |
| 586019 | Preferably excluded from the present invention are one or | | |
| | more polynucleotides comprising a nucleotide sequence | | |
| | described by the general formula of a-b, where a is any | | |
| | integer between 1 to 2841 of SEQ ID NO:36, b is an integer | | |
| | of 15 to 2855, where both a and b correspond to the positions | | |
| | of nucleotide residues shown in SEQ ID NO:36, and where b | | |
| | is greater than or equal to a +14. | | |
| 587225 | Preferably excluded from the present invention are one or | R53038 | |
| | more polynucleotides comprising a nucleotide sequence | | |
| | described by the general formula of a-b, where a is any | | |
| | integer between 1 to 976 of SEQ ID NO:37, b is an integer of | | |
| | 15 to 990, where both a and b correspond to the positions of | | |
| | nucleotide residues shown in SEQ ID NO:37, and where b | | |
| | is greater than or equal to a +14. | | |
| 587445 | Preferably excluded from the present invention are one or | T63800, T92291, T93032 | |
| | more polynucleotides comprising a nucleotide sequence | | |
| | described by the general formula of a-b, where a is any | | |
| | integer between 1 to 419 of SEQ ID NO:38, b is an integer of | | |
| | 15 to 433, where both a and b correspond to the positions of | | |
| | nucleotide residues shown in SEQ ID NO:38, and where b | | |
| | is greater than or equal to a +14. | | |
| 587572 | Preferably excluded from the present invention are one or | T39188, T57086, T57157, T57684, T59683, T59819, T61442, T40462, T63153, | |
| | more polynucleotides comprising a nucleotide sequence | T63392, T63463, T63492, T63567, T63614, T64088, T64267, T64475, T64616, | |
| | described by the general formula of a-b, where a is any | T65748, T65823, T65888, T65969, T69898, T70225, T91680, T91712, T91718, | |
| | integer between 1 to 912 of SEQ ID NO:39, b is an integer | T92174, T92207, T92485, T94608, T94930, T96156, T96416, H64383, | |
| | of 15 to 926, where both a and b correspond to the positions | H67218, H81539, H81539, N75529, N78904, N79800, N81037, N92395, | |
| | of nucleotide residues shown in SEQ ID NO:39, and where b | W05322, W07040, W17198, W19062, W21038, W38307, W57819, W58196, | |
| | is greater than or equal to a +14. | W58305, W73016, W74518, W76624, W79858, W94532, W94533, N91554 | |
| 587596 | Preferably excluded from the present invention are one or | | |
| | more polynucleotides comprising a nucleotide sequence | | |
| | described by the general formula of a-b, where a is any | | |
| | integer between 1 to 392 of SEQ ID NO:40, b is an integer | | |
| | of 15 to 406, where both a and b correspond to the positions | | |
| | of nucleotide residues shown in SEQ ID NO:40, and where b | | |
| | is greater than or equal to a +14. | | |
| 588548 | Preferably excluded from the present invention are one or | R08817, R05288, R72561 | |
| | more polynucleotides comprising a nucleotide sequence | | |
| | described by the general formula of a-b, where a is any | | |
| | integer between 1 to 1487 of SEQ ID NO:41, b is an integer | | |
| | of 15 to 1501, where both a and b correspond to the positions | | |
| | of nucleotide residues shown in SEQ ID NO:41, and where b | | |
| | is greater than or equal to a +14. | | |
| 588881 | Preferably excluded from the present invention are one or | T53536, T53537, T68114, T68227, T72810, T74028, T79915, R15360, T27002, | |
| | more polynucleotides comprising a nucleotide sequence | T27019, T27020, R42103, R42103, R69022, R69023, R77749, R78100, | |
| | described by the general formula of a-b, where a is any | R80740, R80741, H11719, H11791, H12816, H21355, H21454, H39598, | |
| | integer between 1 to 1560 of SEQ ID NO:42, b is an integer | H52177, H52589, N58960, N63521, N99113, W56632, W56546, W79086, | |
| | of 15 to 1574, where both a and b correspond to the positions | W86574, W86708, W87269, W87270, AA004445, AA004448, AA041274, | |
| | of nucleotide residues shown in SEQ ID NO:42, and where b | AA041190, AA128152, AA125916, AA151162, AA151161, AA158853, | |
| | greater than or equal to a +14. | A161117, AA161123 | |
| 588933 | Preferably excluded from the present invention are one or | T53947, T57930, T58014, T61642, T62086, T62144, T67707, T67783, T68996, | |
| | more polynucleotides comprising a nucleotide sequence | T72216, T91400, T84630, H40325, R83041, R83100, R86262, R86263, | |
| | described by the general formula of a-b, where a is any | R91939, R92267, R94960, R95045, R96200, R96250, R98807, R99812, | |
| | integer between 1 to 2182 of SEQ ID NO:43, b is an integer | R99811, H48384, H57704, H57705, H58864, H59880, H59881, H61691, | |
| | of 15 to 2196, where both a and b correspond to the positions | H61692, H62677, H62706, H62791, H62807, H65307, H65322, H65520, | |
| | of nucleotide residues shown in SEQ ID NO:43, and where b | H70399, H71391, H72055, H72124, H72143, H72227, H90149, H90251, | |
| | is greater than or equal to a +14. | H93798, H93853, H94656, H94657, N52576, N68290, N69996, N72344, | |
| | | N80987, W00805, W04945 | |
| 592136 | Preferably excluded from the present invention are one or | T56435, T56586, R12185, H73242, 1174170, 1197928, 1199752, N22702, | |
| | more polynucleotides comprising a nucleotide sequence | N28469, N28723, N29119, N40389, N44822, N64243, N72873, N72909, | |
| | described by the general formula of a-b, where a is any | W03094, W02900, AA029776, AA029777, AA043141, AA075877, | |
| | integer between 1 to 3771 of SEQ ID NO:44, b is an integer | AA150621, AA234264, AA262981 | |
| | of 15 to 3785, where both a and b correspond to the positions | | |
| | of nucleotide residues shown in SEQ ID NO:44, and where b | | |
| | is greater than or equal to a +14. | | |
| 613777 | Preferably excluded from the present invention are one or | | |
| | more polynucleotides comprising a nucleotide sequence | | |
| | described by the general formula of a-b, where a is any | | |
| | integer between 1 to 466 of SEQ ID NO:45, b is an integer | | |
| | of 15 to 480, where both a and b correspond to the positions | | |
| | of nucleotide residues shown in SEQ ID NO:45, and where b | | |
| | is greater than or equal to a +14. | | |
| 614669 | Preferably excluded from the present invention are one or | T40168, T79688, R13509, R17640, R21689, H18568, W25423, W39596, | |
| | more polynucleotides comprising a nucleotide sequence | W53031, AA082508, AA146679 | |
| | described by the general formula of a-b, where a is any | | |
| | integer between 1 to 996 of SEQ ID NO:46, b is an integer | | |
| | of 15 to 1010, where both a and b correspond to the positions | | |
| | of nucleotide residues shown in SEQ ID NO:46, and where b | | |
| | is greater than or equal to a +14. | | |
| 619502 | Preferably excluded from the present invention are one or | T57882, T57964, R35719, R35828, R61628, 1112952, H42833, 1145734, | |
| | more polynucleotides comprising a nucleotide sequence | H84427, N41844, W39544, AA039905, AA233571, AA233683 | |
| | described by the general formula of a-b, where a is any | | |
| | integer between 1 to 3759 of SEQ ID NO:47, b is an integer | | |
| | of 15 to 3773, where both a and b correspond to the positions | | |
| | of nucleotide residues shown in SEQ ID NO:47, and where b | | |
| | is greater than or equal to a +14. | | |
| 619525 | Preferably excluded from the present invention are one or | T39535, T74055, R39623, R62868, R64651, R65629, H03029, H40547, | |
| | more polynucleotides comprising a nucleotide sequence | R97358, H60900, H67966, H71201, H72546, H77491, H79590, H81459, | |
| | described by the general formula of a-b, where a is any | N72440, N77701, AA221001, AA227317 | |
| | integer between 1 to 1448 of SEQ ID NO:48, b is an integer | | |
| | of 15 to 1462, where both a and b correspond to the positions | | |
| | of nucleotide residues shown in SEQ ID NO:48, and where b | | |
| | is greater than or equal to a +14. | | |
| 623660 | Preferably excluded from the present invention are one or | R25689, H80051, W38939, W78791, AAO5S 158, AA099749, AA113422, | |
| | more polynucleotides comprising a nucleotide sequence | AA113804, AA115779, AA182431, AA182755, AA188531, AA190692, | |
| | described by the general formula of a-b, where a is any | A224428 | |
| | integer between 1 to 547 of SEQ ID NO:49, b is an integer | | |
| | of 15 to 561, where both a and b correspond to the positions | | |
| | of nucleotide residues shown in SEQ ID NO:49, and where b | | |
| | is greater than or equal to a +14. | | |
| 625480 | Preferably excluded from the present invention are one or | R51936, H77807 | |
| | more polynucleotides comprising a nucleotide sequence | | |
| | described by the general formula of a-b, where a is any | | |
| | integer between 1 to 1197 of SEQ ID NO:50, b is an integer | | |
| | of 15 to 1211, where both a and b correspond to the positions | | |
| | of nucleotide residues shown in SEQ ID NO:50, and where b | | |
| | is greater than or equal to a +14. | | |
| 647688 | Preferably excluded from the present invention are one or | AA054968, AA071510, AA236671 | |
| | more polynucleotides comprising a nucleotide sequence | | |
| | described by the general formula of a-b, where a is any | | |
| | integer between 1 to 1586 of SEQ ID NO:51, b is an integer | | |
| | of 15 to 1600, where both a and b correspond to the positions | | |
| | of nucleotide residues shown in SEQ ID NO:51, and where b | | |
| | is greater than or equal to a +14. | | |
| 650865 | Preferably excluded from the present invention are one or | T84055, W69878, AA112954, AA255796, AA258551, AA463341, AA424719 | |
| | more polynucleotides comprising a nucleotide sequence | | |
| | described by the general formula of a-b, where a is any | | |
| | integer between 1 to 1554 of SEQ ID NO:52, b is an integer | | |
| | of 15 to 1568, where both a and b correspond to the positions | | |
| | of nucleotide residues shown in SEQ ID NO:52, and where b | | |
| | is greater than or equal to a +14. | | |
| 651676 | Preferably excluded from the present invention are one or | R50184, R50238, R75668, H13196, H13197, R86027, R93619, R93620, | |
| | more polynucleotides comprising a nucleotide sequence | H53347, H53384, H53639, H53682, N95154, W21530, W32438, W45012, | |
| | described by the general formula of a-b, where a is any | AA025096, AA025 86, AA036986, AA036987, AA044584, AA054519, | |
| | integer between 1 to 1029 of SEQ ID NO:53, b is an integer | A054772, AA074644, AA079479, AA079480, AA223158, AA223436, | |
| | of 15 to 1043, where both a and b correspond to the positions | A464687, AA424138, AA429026, AA429198, AA429239, AA427581, | |
| | of nucleotide residues shown in SEQ ID NO:53, and where b | A427630 | |
| | is greater than or equal to a +14. | | |
| 651751 | Preferably excluded from the present invention are one or | T39956, T50706, T50861, T71880, N79771, N93428, W07270, W19106, | |
| | more polynucleotides comprising a nucleotide sequence | W21470, AA233679 | |
| | described by the general formula of a-b, where a is any | | |
| | integer between 1 to 2557 of SEQ ID NO:54, b is an integer | | |
| | of 15 to 2571, where both a and b correspond to the positions | | |
| | of nucleotide residues shown in SEQ ID NO:54, and where b | | |
| | is greater than or equal to a +14. | | |
| 651787 | Preferably excluded from the present invention are one or | T59677, T59813, T63514, T64074, T69968, T73846, T74246, T89719, T89816, | |
| | more polynucleotides comprising a nucleotide sequence | T89830, T92638, T92944, T93011, T93218, T98228, T85518, R47979, | |
| | described by the general formula of a-b, where a is any | R48091, R56246, R56328, R73988, H05307, H05357, H24508, H47709, | |
| | integer between 1 to 1288 of SEQ ID NO:55, b is an integer | H47714, H48061, H48066, R96654, R96706, H51095, H51680, H51999, | |
| | of 15 to 1302, where both a and b correspond to the positions | H52596, H52597, H78841, H80088, H82407, H82665, N41665, N54547, | |
| | of nucleotide residues shown in SEQ ID NO:55, and where b | N69295, N76250, N80222, N92452, N94117, N98344, N98394, W31336, | |
| | is greater than or equal to a +14. | W38511, W40187, W40190, N90939, AA024976, AA025072, AA046296, | |
| | | AA046360, AA075540, AA075553, AA075663, AA075664, AA075729, | |
| | | AA075781, AA158653, AA159063, AA164191, AA164192, AA166826, | |
| | | AA166997, AA167336, AA169607, AA236638, AA463953, AA464089, | |
| | | A429853, AA429884 | |
| 651840 | Preferably excluded from the present invention are one or | T66896, W07604, AA011006, AA025714, AA099639, AA102243, AA100320, | |
| | more polynucleotides comprising a nucleotide sequence | AA099769, AA100565, AA112731, AA112732, AA112721, AA112780, | |
| | described by the general formula of a-b, where a is any | A112793, AA112800, AA112810, AA112826, AA112832, AA111913, | |
| | integer between 1 to 1423 of SEQ ID NO:56, b is an integer | AA112038, AA112790, AA112836, AA112948, AA112949, AA113000, | |
| | of 15 to 1437, where both a and b correspond to the positions | AA128476, AA176521, AA176789, AA176673, AA178866, AA178904, | |
| | of nucleotide residues shown in SEQ ID NO:56, and where b | AA179111, AA179247, AA179122, AA179972, AA180244, AA180980, | |
| | is greater than or equal to a +14. | AA180803, AA182902, AA178919, AA192575, AA192585, AA192264, | |
| | | AA192710, AA193009, AA193072, AA193208, AA194449, AA194460, | |
| | | AA194479, AA194342, AA195969, AA196021, AA196089, AA196097, | |
| | | AA196120, AA196364, AA196366, AA196653, AA196642, AA196673, | |
| | | AA196681, AA196846, AA197130, AA197163, AA197239 | |
| 651892 | Preferably excluded from the present invention are one or | | |
| | more polynucleotides comprising a nucleotide sequence | | |
| | described by the general formula of a-b, where a is any | | |
| | integer between 1 to 2019 of SEQ ID NO:57, b is an integer | | |
| | of 15 to 2033, where both a and b correspond to the positions | | |
| | of nucleotide residues shown in SEQ ID NO:57, and where b | | |
| | is greater than or equal to a +14. | | |
| 652557 | Preferably excluded from the present invention are one or | | |
| | more polynucleotides comprising a nucleotide sequence | | |
| | described by the general formula of a-b, where a is any | | |
| | integer between 1 to 1818 of SEQ ID NO:58, b is an integer | | |
| | of 15 to 1832, where both a and b correspond to the positions | | |
| | of nucleotide residues shown in SEQ ID NO:58, and where b | | |
| | is greater than or equal to a +14. | | |
| 653011 | Preferably excluded from the present invention are one or | T60269, T61649, T64306, R34841, R38709, R43326, R47775, R43326, | |
| | more polynucleotides comprising a nucleotide sequence | R76527, R80595, R80596, H04312, H04354, H27791, R98843, H69074, | |
| described by the general formula of a-b, where a is any | N31337, N33901, N49898, N62500, N67530, W78148, W79913, AA128245, | | |
| | integer between 1 to 1392 of SEQ ID NO:59, b is an integer | AA234063, AA234454, AA253399, AA253502 | |
| | of 15 to 1406, where both a and b correspond to the positions | | |
| | of nucleotide residues shown in SEQ ID NO:59, and where b | | |
| | is greater than or equal to a +14. | | |
| 656155 | Preferably excluded from the present invention are one or | | |
| | more polynucleotides comprising a nucleotide sequence | | |
| | described by the general formula of a-b, where a is any | | |
| | integer between 1 to 251 of SEQ ID NO:60, b is an integer | | |
| | of 15 to 265, where both a and b correspond to the positions | | |
| | of nucleotide residues shown in SEQ ID NO:60, and where b | | |
| | is greater than or equal to a +14. | | |
| 656930 | Preferably excluded from the present invention are one or | | |
| | more polynucleotides comprising a nucleotide sequence | | |
| | described by the general formula of a-b, where a is any | | |
| | integer between 1 to 923 of SEQ ID NO:61, b is an integer | | |
| | of 15 to 937, where both a and b correspond to the positions | | |
| | of nucleotide residues shown in SEQ ID NO:61, and where b | | |
| | is greater than or equal to a +14. | | |
| 659023 | Preferably excluded from the present invention are one or | AA024848 | |
| | more polynucleotides comprising a nucleotide sequence | | |
| | described by the general formula of a-b, where a is any | | |
| | integer between 1 to 698 of SEQ ID NO:62, b is an integer | | |
| | of 15 to 712, where both a and b correspond to the positions | | |
| | of nucleotide residues shown in SEQ ID NO:62, and where b | | |
| | is greater than or equal to a +14. | | |
| 659263 | Preferably excluded from the present invention are one or | | |
| | more polynucleotides comprising a nucleotide sequence | | |
| | described by the general formula of a-b, where a is any | | |
| | integer between 1 to 1044 of SEQ ID NO:63, b is an integer | | |
| | of 15 to 1058, where both a and b correspond to the positions | | |
| | of nucleotide residues shown in SEQ ID NO:63, and where b | | |
| | is greater than or equal to a +14. | | |
| 660696 | Preferably excluded from the present invention are one or | T47468, T47696, T48602, T48603, T49199, T49200, T49659, T49660, T49673, | |
| | more polynucleotides comprising a nucleotide sequence | T49674, T51475, T56701, T60767, T60810, T91749, T92514, T70778, T90173, | |
| | described by the general formula of a-b, where a is any | R09881, T77979, T78190, T78323, T78702, T80415, T81934, T81935, T82983, | |
| | integer between 1 to 2677 of SEQ ID NO:64, b is an integer | T97143, R22979, R23085, R23454, R23465, R23985, R24181, R24474, | |
| | of 15 to 2691, where both a and b correspond to the positions | R24475, R26053, R26062, R26967, R28422, R31303, R31565, R33106, | |
| | of nucleotide residues shown in SEQ ID NO:64, and where b | R33203, R35991, R36364, R36676, R37192, R37193, R39689, R51 191, | |
| | is greater than or equal to a +14. | R53583, R62740, R62965, R63019, R63693, R637 17, R63763, R64121, | |
| | | R64219, R66523, R68974, R68975, R70114, R70115, R72983, R73586, | |
| | | R73594, R78225, R78226, H01045, H01425, H01426, H01798, H40591, | |
| | | H45106, H45415, R86177, R86338, R92741, R96370, R96412, R97029, | |
| | | R97266, R97393, R97437, H50949, H51608, H51998, H52116, H57474, | |
| | | H57856, H57995, H59457, H59982, H60111, H63800, H71325, H71371, | |
| | | H79869, H79870, H81092, H81093, H88562, H95676, H95745, N22278, | |
| | | N49708, N52631, N53654, N58430, N68462, N71638, N73373, N78020, | |
| | | N78852, N8H76, N94594, W01664, W02147, W02216, W04834, W04843, | |
| | | W17251, W21564, W21539, W23632, W23802, W25419, W32384, W35222, | |
| | | W46230, W46231, W48691, W48692, W52704, W58519, W59976, W69762, | |
| | | W69868, W72449, W72261, W73733, W76298, W76478, W78140, W79490, | |
| | | W80420, W80548, W88575, W93509, W93508, N91306, AA031483, | |
| | | AA031504, AA031462, AA031550, AA034252, AA035471, AA035582, | |
| | | AA037260, AA037507, AA040915, AA039800, AA043301, AA043302, | |
| | | AA043640, AA045108, AA045154, AA054564, AA054624, AA063638, | |
| | | AA062919, AA083744, AA101855, AA102065, AA114883, AA114884, | |
| | | AA114889, AA134060, AA130288, AA157136, AA157191, AA167181, | |
| | | AA196182 | |
| 666881 | Preferably excluded from the present invention are one or | | |
| | more polynucleotides comprising a nucleotide sequence | | |
| | described by the general formula of a-b, where a is any | | |
| | integer between 1 to 1503 of SEQ ID NO:65, b is an integer | | |
| | of 15 to 1517, where both a and b correspond to the positions | | |
| | of nucleotide residues shown in SEQ ID NO:65, and where b | | |
| | is greater than or equal to a +14. | | |
| 677071 | Preferably excluded from the present invention are one or | R68978, R69696, H04882, N55144 | |
| | more polynucleotides comprising a nucleotide sequence | | |
| | described by the general formula of a-b, where a is any | | |
| | integer between 1 to 1114 of SEQ ID NO:66, b is an integer | | |
| | of 15 to 1128, where both a and b correspond to the positions | | |
| | of nucleotide residues shown in SEQ ID NO:66, and where b | | |
| | is greater than or equal to a +14. | | |
| 677997 | Preferably excluded from the present invention are one or | | |
| | more polynucleotides comprising a nucleotide sequence | | |
| | described by the general formula of a-b, where a is any | | |
| | integer between 1 to 1014 of SEQ ID NO:67, b is an integer | | |
| | of 15 to 1028, where both a and b correspond to the positions | | |
| | of nucleotide residues shown in SEQ ID NO:67, and where b | | |
| | is greater than or equal to a +14. | | |
| 681507 | Preferably excluded from the present invention are one or | T54754, T66864, T72618, T72688, T78143, T83143, T98584, R21505, | |
| | more polynucleotides comprising a nucleotide sequence | R21607, R31970, R35046, R46863, R53841, R53877, R67660, R79744, | |
| | described by the general formula of a-b, where a is any | R82384, R82702, H03297, H12692, R91706, R94178, R94179, H54137, | |
| | integer between 1 to 2119 of SEQ ID NO:68, b is an integer | H75449, H75448, N33743, N35941, N58696, N80900, W04462, W32400, | |
| | of 15 to 2133, where both a and b correspond to the positions | W56025, W56100, W79532, W79612, AA026371, AA026464, AA031315, | |
| | fof nucleotide residues shown in SEQ ID NO:68, and where b | AA031424, AA080869, AA098956, AA102218, AA100703, AA114096, | |
| | greater than or equal to a +14. | AA121157, AA122375, AA129155, AA132527, AA132588, AA142892, | |
| | | AA143165, AA190870, AA190963, AA464462 | |
| 682736 | Preferably excluded from the present invention are one or | T94338, R08358, T83373, T83518, R19695, R44251, R44251, H23998, | |
| | more polynucleotides comprising a nucleotide sequence | H52552,H71674, H72238, N24833, N31760, N39199, N45266, W38403, | |
| | described by the general formula of a-b, where a is any | W60006, W69358, W69359, W86240, W86269, AA057846, AA099877, | |
| | integer between 1 to 1622 of SEQ ID NO:69, b is an integer | AA100110, AA114232, AA122230, AA121389, AA121584, AA133105, | |
| | of 15 to 1636, where both a and b correspond to the positions | AA161221, AA173073, AA227447 | |
| | of nucleotide residues shown in SEQ ID NO:69, and where b | | |
| | is greater than or equal to a +14. | | |
| 683116 | Preferably excluded from the present invention are one or | R36287, H06617, H06748 | |
| | more polynucleotides comprising a nucleotide sequence | | |
| | described by the general formula of a-b, where a is any | | |
| | integer between 1 to 1451 of SEQ ID NO:70, b is an integer | | |
| | of 15 to 1465, where both a and b correspond to the positions | | |
| | of nucleotide residues shown in SEQ ID NO:70, and where b | | |
| | is greater than or equal to a +14. | | |
| 686494 | Preferably excluded from the present invention are one or | T62597, T89715, T91664, T93265, T66694, R13787, R16235, R19964, | |
| | more polynucleotides comprising a nucleotide sequence | R37645, R40195, R40826, R45066, R46734, R52508, R40195, R40826, | |
| | described by the general formula of a-b, where a is any | R46734, R45066, R61284, H05749, H15041, H15952, H22809, H23014, | |
| | integer between 1 to 1758 of SEQ ID NO:71, b is an integer H23480, H24054, H24162, N51085, N54211, N72577, W02404, AA001565, | | |
| | of 15 to 1772, where both a and b correspond to the positions | AA016969 | |
| | of nucleotide residues shown in SEQ ID NO:71, and where b | | |
| | is greater than or equal to a +14. | | |
| 686634 | Preferably excluded from the present invention are one or | | |
| | more polynucleotides comprising a nucleotide sequence | | |
| | described by the general formula of a-b, where a is any | | |
| | integer between 1 to 1149 of SEQ ID NO:72, b is an integer | | |
| | of 15 to 1163, where both a and b correspond to the positions | | |
| | of nucleotide residues shown in SEQ ID NO:72, and where b | | |
| | is greater than or equal to a +14. | | |
| 688221 | Preferably excluded from the present invention are one or | | |
| | more polynucleotides comprising a nucleotide sequence | | |
| | described by the general formula of a-b, where a is any | | |
| | integer between 1 to 2908 of SEQ ID NO:73, b is an integer | | |
| | of 15 to 2922, where both a and b correspond to the positions | | |
| | of nucleotide residues shown in SEQ ID NO:73, and where b | | |
| | is greater than or equal to a +14. | | |
| 703498 | Preferably excluded from the present invention are one or | T52814, T59329, T59725, T63762, T73351, R21181, R22799, R28634, | |
| | more polynucleotides comprising a nucleotide sequence | R32514, R32564, R32627, R52152, R53100, H06479, H49626, H49716, | |
| | described by the general formula of a-b, where a is any | H57878, H57879, H88974, H89060, H88974, N20384, N24121, N25447, | |
| | integer between 1 to 1564 of SEQ ID NO:74, b is an integer | N26475, N31016, N31420, N31907, N36109, N42690, N44115, N51852, | |
| | of 15 to 1578, where both a and b correspond to the positions | N68213, N70141, N70661, N71996, N72027, N98318, N99378, N99479, | |
| | of nucleotide residues shown in SEQ ID NO:74, and where b | W37925, W74077, W79645, AA022687, AA022806, AA055058, AA055059, | |
| | is greater than or equal to a +14. | AA076661, AA079608, AA126936, AA127139, AA128662, AA128648, | |
| | | AA128651, AA128787, AA128816, AA128840, AA132009, AA132016, | |
| | | AA132027, AA132097, AA132119, AA132149, AA133000, AA135495, | |
| | | AA137174, AA146977, AA147156, AA147863, AA147877, AA151371, | |
| | | AA151372, AA151639, AA149559, AA157539, AA158192, AA199713, | |
| | | A232546 | |
| 705143 | Preferably excluded from the present invention are one or | T48699, T48700, T51420, T53379, T54426, T39566, T47698, T49972, T51294, | |
| | more polynucleotides comprising a nucleotide sequence | T54475, T53380, T59401, T86970, T91310, T79635, T79720, T83472, T84111, | |
| | described by the general formula of a-b, where a is any | T84891, R33368, R33369, R33998, R36702, R55647, R63964, R64068, | |
| | integer between 1 to 3219 of SEQ ID NO:75, b is an integer | R75939, R80444, R80647, H00242, H00243, H01490, H01592, H04172, | |
| | of 15 to 3233, where both a and b correspond to the positions | H04173, H13208, H13574, H21768, H21767, H25031, H26528, H28663, | |
| | of nucleotide residues shown in SEQ ID NO:75, and where b | 39497, H39873, H42057, H42102, H44558, H44559, H45520, H45519, | |
| | is greater than or equal to a +14. | 84559, R94554, R94555, R99885, R99886, H79800, H79894, H80460, | |
| | | H81380, N52494, N54896, N57784, N59747, N63528, N68124, N94624, | |
| | | N94848, N98872, W23823, W38568, W49671, W49765, W60785, W60786, | |
| | | W72534, W73483, W73555, W73568, W73487, W76 108, W81036, W81073, | |
| | | AA024507, AA024592, AA025503, AA025906, AA033919, AA033920, | |
| | | AA034494, AA035699, AA056692, AA058382, AA063569, AA069734, | |
| | | AA069751, AA100815, AA102343, AA116023, AA116024, AA126868, | |
| | | AA127059, AA125936, AA131868, AA131873, AA131977, AA148439, | |
| | | AA148438, AA157513, AA158201, AA158210, AA158926, AA158927, | |
| | | AA458478 | |
| 705227 | Preferably excluded from the present invention are one or | | |
| | more polynucleotides comprising a nucleotide sequence | | |
| | described by the general formula of a-b, where a is any | | |
| | integer between 1 to 1656 of SEQ ID NO:76, b is an integer | | |
| | of 15 to 1670, where both a and b correspond to the positions | | |
| | of nucleotide residues shown in SEQ ID NO:76, and where b | | |
| | is greater than or equal to a +14. | | |
| 705958 | Preferably excluded from the present invention are one or | T57095, T57123, T57165, T57188, T57802, T57845, T62006, T62196, T39207, | |
| | more polynucleotides comprising a nucleotide sequence | T63715, T64157, T64524, T64552, T65949, T71948, T82364, T82399, T89927, | |
| | described by the general formula of a-b, where a is any | T91496, T91707, T92189, T92222, T92454, T92473, T93065, T93151, T94084, | |
| | integer between 1 to 1163 of SEQ ID NO:77, b is an integer | T94162, T94851, T94896, T96577, T98049, T98140, H67037, N69047, | |
| | of 15 to 1177, where both a and b correspond to the positions | N79520, W00695, W16512, N91 128 | |
| | of nucleotide residues shown in SEQ ID NO:77, and where b | | |
| | is greater than or equal to a +14. | | |
| 705965 | Preferably excluded from the present invention are one or | AA172120, AA460448 | |
| | more polynucleotides comprising a nucleotide sequence | | |
| | described by the general formula of a-b, where a is any | | |
| | integer between 1 to 815 of SEQ ID NO:78, b is an integer | | |
| | of 15 to 829, where both a and b correspond to the positions | | |
| | of nucleotide residues shown in SEQ ID NO:78, and where b | | |
| | is greater than or equal to a +14. | | |
| 706145 | Preferably excluded from the present invention are one or | T48474, T54276, T54384, T94387, T94474, R12367, W37454, W40384, | |
| | more polynucleotides comprising a nucleotide sequence | W45354, W73244, W74705, W74742, AA100479, AA135190, AA147042, | |
| | described by the general formula of a-b, where a is any | AA149010, AA148966, AA181300, AA187014, AA235328 | |
| | integer between 1 to 1129 of SEQ ID NO:79, b is an integer | | |
| | of 15 to 1143, where both a and b correspond to the positions | | |
| | of nucleotide residues shown in SEQ ID NO:79, and where b | | |
| | is greater than or equal to a +14. | | |
| 706473 | Preferably excluded from the present invention are one or | R40073, N21295, N23386, N24733, N3 1230, N47403, N47404, N67795, | |
| | more polynucleotides comprising a nucleotide sequence | N77874, W03357, AA129311, AA129355, AA133404, AA135135, AA1S1911, | |
| | described by the general formula of a-b, where a is any | AA161316, AA424925, AA426165 | |
| | integer between 1 to 1212 of SEQ ID NO:80, b is an integer | | |
| | of 15 to 1226, where both a and b correspond to the positions | | |
| | of nucleotide residues shown in SEQ ID NO:80, and where b | | |
| | is greater than or equal to a +14. | | |
| 707380 | Preferably excluded from the present invention are one or | | |
| | more polynucleotides comprising a nucleotide sequence | | |
| | described by the general formula of a-b, where a is any | | |
| | integer between 1 to 560 of SEQ ID NO:81, b is an integer | | |
| | of 15 to 574, where both a and b correspond to the positions | | |
| | of nucleotide residues shown in SEQ ID NO:81, and where b | | |
| | is greater than or equal to a +14. | | |
| 707779 | Preferably excluded from the present invention are one or | | |
| | more polynucleotides comprising a nucleotide sequence | | |
| | described by the general formula of a-b, where a is any | | |
| | integer between 1 to 2029 of SEQ ID NO:82, b is an integer | | |
| | of 15 to 2043, where both a and b correspond to the positions | | |
| | of nucleotide residues shown in SEQ ID NO:82, and where b | | |
| | is greater than or equal to a +14. | | |
| 709441 | Preferably excluded from the present invention are one or | | |
| | more polynucleotides comprising a nucleotide sequence | | |
| | described by the general formula of a-b, where a is any | | |
| | integer between 1 to 1042 of SEQ ID NO:83, b is an integer | | |
| | of 15 to 1056, where both a and b correspond to the positions | | |
| | of nucleotide residues shown in SEQ ID NO:83, and where b | | |
| | is greater than or equal to a +14. | | |
| 710443 | Preferably excluded from the present invention are one or | T50818, T60229, T64565, T72817, T82382, T74355, R08996, T78357, | |
| | more polynucleotides comprising a nucleotide sequence | R14332, R23667, H66532, H66538, N44588, W05229, W52397, W52554, | |
| | described by the general formula of a-b, where a is any | W57898, AA018200, AA057315, AA057333, AA079749, AA081890, | |
| | integer between 1 to 2085 of SEQ ID NO:84, b is an integer AA085154, AA085336, AA102214, AA101505, AA101588, AA151381, | | |
| | of 15 to 2099, where both a and b correspond to the positions | AA179541, AA186541, AA190673, AA199674, AA203455, AA224094, | |
| | of nucleotide residues shown in SEQ ID NO:84, and where b | AA227755 | |
| | is greater than or equal to a +14. | | |
| 710603 | Preferably excluded from the present invention are one or | | |
| | more polynucleotides comprising a nucleotide sequence | | |
| | described by the general formula of a-b, where a is any | | |
| | integer between 1 to 3089 of SEQ ID NO:85, b is an integer | | |
| | of 15 to 3103, where both a and b correspond to the positions | | |
| | of nucleotide residues shown in SEQ ID NO:85, and where b | | |
| | is greater than or equal to a +14. | | |
| 710616 | Preferably excluded from the present invention are one or | | |
| | more polynucleotides comprising a nucleotide sequence | | |
| | described by the general formula of a-b, where a is any | | |
| | integer between 1 to 887 of SEQ ID NO:86, b is an integer | | |
| | 15 to 901, where both a and b correspond to the positions | | |
| | nucleotide residues shown in SEQ ID NO:86, and where b | | |
| | greater than or equal to a +14. | | |
| 710662 | Preferably excluded from the present invention are one or | H44435, H44469, N91837, N93564, W21040, AA156631, AA169333, | |
| | more polynucleotides comprising a nucleotide sequence | AA169539 | |
| | described by the general formula of a-b, where a is any | | |
| | integer between 1 to 545 of SEQ ID NO:87, b is an integer | | |
| | of 15 to 559, where both a and b correspond to the positions | | |
| | of nucleotide residues shown in SEQ ID NO:87, and where b | | |
| | is greater than or equal to a +14. | | |
| 710917 | Preferably excluded from the present invention are one or | T69770, T86679, T86771, R07492, T66725, T84963, R00544, R00647, | |
| | more polynucleotides comprising a nucleotide sequence | R15450, R23175, R33014, R36435, R79175, R80392, H11173, H16799, | |
| | described by the general formula of a-b, where a is any | H16909, H23735, H23764, H26150, H40756, R96065, H50232, H50267, | |
| | integer between 1 to 2273 of SEQ ID NO:88, b is an integer | H81826, H81827, H85100, H89517, H89664, H97062, H97887, N26767, | |
| | of 15 to 2287, where both a and b correspond to the positions | N30263, N41986, N78601, N79449, N79984, N95158, N95364, N99142, | |
| | of nucleotide residues shown in SEQ ID NO:88, and where b | W07339, W07819, W21534, W23977, W52960, W56869, W58197, W58306, | |
| | is greater than or equal to a +14. | W72638, W73505, W74799, W77918, W93541, W93542, W96456, W96556, | |
| | | AA009409, AA010115, AA010116, AA010633, AA011223, AA022686, | |
| | | AA022805, AA026132, AA029615, AA044397, AA042848, AA128354, | |
| | | AA128496, AA133694, AA143731, AA159218, AA160796, AA187301, | |
| | | AA187092, AA227584, AA227892 | |
| 711866 | Preferably excluded from the present invention are one or | N77998 | |
| | more polynucleotides comprising a nucleotide sequence | | |
| | described by the general formula of a-b, where a is any | | |
| | integer between 1 to 593 of SEQ ID NO:89, b is an integer | | |
| | of 15 to 607, where both a and b correspond to the positions | | |
| | of nucleotide residues shown in SEQ ID NO:89, and where b | | |
| | is greater than or equal to a +14. | | |
| 714903 | Preferably excluded from the present invention are one or | | |
| | more polynucleotides comprising a nucleotide sequence | | |
| | described by the general formula of a-b, where a is any | | |
| | integer between 1 to 2324 of SEQ ID NO:90, b is an integer | | |
| | of 15 to 2338, where both a and b correspond to the positions | | |
| | of nucleotide residues shown in SEQ ID NO:90, and where b | | |
| | is greater than or equal to a +14. | | |
| 718139 | Preferably excluded from the present invention are one or | N23988, N31889, N32345, AA026422, AA026499, AA169674, AA169486 | |
| | more polynucleotides comprising a nucleotide sequence | | |
| | described by the general formula of a-b, where a is any | | |
| | integer between 1 to 1260 of SEQ ID NO:91, b is an integer | | |
| | of 15 to 1274, where both a and b correspond to the positions | | |
| | of nucleotide residues shown in SEQ ID NO:91, and where b | | |
| | is greater than or equal to a +14. | | |
| 719142 | Preferably excluded from the present invention are one or | | |
| | more polynucleotides comprising a nucleotide sequence | | |
| | described by the general formula of a-b, where a is any | | |
| | integer between 1 to 1397 of SEQ ID NO:92, b is an integer | | |
| | of 15 to 1411, where both a and b correspond to the positions | | |
| | of nucleotide residues shown in SEQ ID NO:92, and where b | | |
| | is greater than or equal to a +14. | | |
| 719721 | Preferably excluded from the present invention are one or | | |
| | more polynucleotides comprising a nucleotide sequence | | |
| | described by the general formula of a-b, where a is any | | |
| | integer between 1 to 715 of SEQ ID NO:93, b is an integer | | |
| | of 15 to 729, where both a and b correspond to the positions | | |
| | of nucleotide residues shown in SEQ ID NO:93, and where b | | |
| | is greater than or equal to a +14. | | |
| 719914 | Preferably excluded from the present invention are one or | | |
| | more polynucleotides comprising a nucleotide sequence | | |
| | described by the general formula of a-b, where a is any | | |
| | integer between 1 to 1781 of SEQ ID NO:94, b is an integer | | |
| | of 15 to 1795, where both a and b correspond to the positions | | |
| | of nucleotide residues shown in SEQ ID NO:94, and where b | | |
| | is greater than or equal to a +14. | | |
| 720134 | Preferably excluded from the present invention are one or | | |
| | more polynucleotides comprising a nucleotide sequence | | |
| | described by the general formula of a-b, where a is any | | |
| | integer between 1 to 743 of SEQ ID NO:95, b is an integer | | |
| | 15 to 757, where both a and b correspond to the positions | | |
| | nucleotide residues shown in SEQ ID NO:95, and where b | | |
| | greater than or equal to a +14. | | |
| 720270 | Preferably excluded from the present invention are one or | | |
| | more polynucleotides comprising a nucleotide sequence | | |
| | described by the general formula of a-b, where a is any | | |
| | integer between 1 to 874 of SEQ ID NO:96, b is an integer | | |
| | 15 to 888, where both a and b correspond to the positions | | |
| | nucleotide residues shown in SEQ ID NO:96, and where b | | |
| | greater than or equal to a +14. | | |
| 720583 | Preferably excluded from the present invention are one or | | |
| | more polynucleotides comprising a nucleotide sequence | | |
| | described by the general formula of a-b, where a is any | | |
| | integer between 1 to 2537 of SEQ ID NO:97, b is an integer | | |
| | of 15 to 2551, where both a and b correspond to the positions | | |
| | of nucleotide residues shown in SEQ ID NO:97, and where b | | |
| | is greater than or equal to a +14. | | |
| 720904 | Preferably excluded from the present invention are one or | | |
| | more polynucleotides comprising a nucleotide sequence | | |
| | described by the general formula of a-b, where a is any | | |
| | integer between 1 to 1092 of SEQ ID NO:98, b is an integer | | |
| | of 15 to 1106, where both a and b correspond to the positions | | |
| | of nucleotide residues shown in SEQ ID NO:98, and where b | | |
| | is greater than or equal to a +14. | | |
| 721194 | Preferably excluded from the present invention are one or | | |
| | more polynucleotides comprising a nucleotide sequence | | |
| | described by the general formula of a-b, where a is any | | |
| | integer between 1 to 1254 of SEQ ID NO:99, b is an integer | | |
| | of 15 to 1268, where both a and b correspond to the positions | | |
| | of nucleotide residues shown in SEQ ID NO:99, and where b | | |
| | is greater than or equal to a +14. | | |
| 721271 | Preferably excluded from the present invention are one or | | |
| | more polynucleotides comprising a nucleotide sequence | | |
| | described by the general formula of a-b, where a is any | | |
| | integer between 1 to 1129 of SEQ ID NO:100, b is an integer | | |
| | of 15 to 1143, where both a and b correspond to the positions | | |
| | of nucleotide residues shown in SEQ ID NO:100, and where | | |
| | is greater than or equal to a +14. | | |
| 723886 | Preferably excluded from the present invention are one or | | |
| | more polynucleotides comprising a nucleotide sequence | | |
| | described by the general formula of a-b, where a is any | | |
| | integer between 1 to 571 of SEQ ID NO:101, b is an integer | | |
| | of 15 to 585, where both a and b correspond to the positions | | |
| | of nucleotide residues shown in SEQ ID NO:101, and where | | |
| | is greater than or equal to a +14. | | |
| 723968 | Preferably excluded from the present invention are one or | T49189, T49190, T57872, T57953, T60468, T60622, T68275, T68337, R10623, | |
| | more polynucleotides comprising a nucleotide sequence | R10624, H19677, H19678, H25656, H26242, H27936, H27937, H43659, | |
| | described by the general formula of a-b, where a is any | H44727, 1145127, R83002, R83052, N44505, N52201, N71160, N75069, | |
| | integer between 1 to 565 of SEQ ID NO:102, b is an integer | N93722, W05541, W05805, W15578, W17 186, W21 128, W23812, W24230, | |
| | of 15 to 579, where both a and b correspond to the positions | W25266, W31654, W33175, W37240, W57606, W58199, W58308, W63709, | |
| | of nucleotide residues shown in SEQ ID NO:102, and where | W73015, W73152, W76623, W94088, W94089, W95125, W95242, N90150, | |
| | b is greater than or equal to a +14. | AA010262, AA010401, AA010479, AA010507, AA022656, AA022738, | |
| | | AA027253, AA037162, AA037181, AA047030, AA047248, AA045811, | |
| | | AA045906, AA076292, AA076293, AA100771, AA128201, AA129394, | |
| | | AA133794, AA156714, AA167700, AA167814, AA178899, AA178902, | |
| | | AA461557, AA460631, AA428355 | |
| 725321 | Preferably excluded from the present invention are one or | | |
| | more polynucleotides comprising a nucleotide sequence | | |
| | described by the general formula of a-b, where a is any | | |
| | integer between 1 to 391 of SEQ ID NO:103, b is an integer | | |
| | of 15 to 405, where both a and b correspond to the positions | | |
| | of nucleotide residues shown in SEQ ID NO:103, and where | | |
| | is greater than or equal to a +14. | | |
| 725326 | Preferably excluded from the present invention are one or | | |
| | more polynucleotides comprising a nucleotide sequence | | |
| | described by the general formula of a-b, where a is any | | |
| | integer between 1 to 2144 of SEQ ID NO:104, b is an integer | | |
| | of 15 to 2158, where both a and b correspond to the positions | | |
| | of nucleotide residues shown in SEQ ID NO:104, and where | | |
| | is greater than or equal to a +14. | | |
| 726034 | Preferably excluded from the present invention are one or | | |
| | more polynucleotides comprising a nucleotide sequence | | |
| | described by the general formula of a-b, where a is any | | |
| | integer between 1 to 853 of SEQ ID NO:105, b is an integer | | |
| | of 15 to 867, where both a and b correspond to the positions | | |
| | of nucleotide residues shown in SEQ ID NO:105, and where | | |
| | is greater than or equal to a +14. | | |
| 726602 | Preferably excluded from the present invention are one or | | |
| | more polynucleotides comprising a nucleotide sequence | | |
| | described by the general formula of a-b, where a is any | | |
| | integer between 1 to 428 of SEQ ID NO:106, b is an integer | | |
| | of 15 to 442, where both a and b correspond to the positions | | |
| | of nucleotide residues shown in SEQ ID NO:106, and where | | |
| | is greater than or equal to a +14. | | |
| 726965 | Preferably excluded from the present invention are one or | | |
| | more polynucleotides comprising a nucleotide sequence | | |
| | described by the general formula of a-b, where a is any | | |
| | integer between 1 to 1454 of SEQ ID NO:107, b is an integer | | |
| | of 15 to 1468, where both a and b correspond to the positions | | |
| | of nucleotide residues shown in SEQ ID NO:107, and where | | |
| | is greater than or equal to a +14. | | |
| 727809 | Preferably excluded from the present invention are one or | | |
| | more polynucleotides comprising a nucleotide sequence | | |
| | described by the general formula of a-b, where a is any | | |
| | integer between 1 to 2474 of SEQ ID NO:108, b is an integer | | |
| | of 15 to 2488, where both a and b correspond to the positions | | |
| | of nucleotide residues shown in SEQ ID NO:108, and where | | |
| | is greater than or equal to a +14. | | |
| 731703 | Preferably excluded from the present invention are one or | A022892, AA046612, AA046520 | |
| | more polynucleotides comprising a nucleotide sequence | | |
| | described by the general formula of a-b, where a is any | | |
| | integer between 1 to 1877 of SEQ ID NO:109, b is an integer | | |
| | of 15 to 1891, where both a and b correspond to the positions | | |
| | of nucleotide residues shown in SEQ ID NO:109, and where | | |
| | is greater than or equal to a +14. | | |
| 732840 | Preferably excluded from the present invention are one or | | |
| | more polynucleotides comprising a nucleotide sequence | | |
| | described by the general formula of a-b, where a is any | | |
| | integer between 1 to 1545 of SEQ ID NO:110, b is an integer | | |
| | of 15 to 1559, where both a and b correspond to the positions | | |
| | of nucleotide residues shown in SEQ ID NO:110, and where | | |
| | is greater than or equal to a +14. | | |
| 733629 | Preferably excluded from the present invention are one or | | |
| | more polynucleotides comprising a nucleotide sequence | | |
| | described by the general formula of a-b, where a is any | | |
| | integer between 1 to 571 of SEQ ID NO:111, b is an integer | | |
| | of 15 to 585, where both a and b correspond to the positions | | |
| | of nucleotide residues shown in SEQ ID NO:111, and where | | |
| | b is greater than or equal to a +14. | | |
| 733749 | Preferably excluded from the present invention are one or | R12963, R13257, R14924, R52718, R71280, H26508, H49904, W20330, | |
| | more polynucleotides comprising a nucleotide sequence | AA069744, AA112936, AA233733 | |
| | described by the general formula of a-b, where a is any | | |
| | integer between 1 to 2374 of SEQ ID NO:112, b is an integer | | |
| | of 15 to 2388, where both a and b correspond to the positions | | |
| | of nucleotide residues shown in SEQ ID NO:112, and where | | |
| | b is greater than or equal to a +14. | | |
| 734119 | Preferably excluded from the present invention are one or | 68619, R80278, H08190, H08288, N31192, N42303, AA252183 | |
| | more polynucleotides comprising a nucleotide sequence | | |
| | described by the general formula of a-b, where a is any | | |
| | integer between 1 to 2289 of SEQ ID NO:113, b is an integer | | |
| | of 15 to 2303, where both a and b correspond to the positions | | |
| | of nucleotide residues shown in SEQ ID NO:113, and where | | |
| | b is greater than or equal to a +14. | | |
| 734637 | Preferably excluded from the present invention are one or | N36346, W37360, AA135919, AA188591, AA190956, AA191167 | |
| | more polynucleotides comprising a nucleotide sequence | | |
| | described by the general formula of a-b, where a is any | | |
| | integer between 1 to 737 of SEQ ID NO:114, b is an integer | | |
| | of 15 to 751, where both a and b correspond to the positions | | |
| | of nucleotide residues shown in SEQ ID NO:114, and where | | |
| | b is greater than or equal to a +14. | | |
| 734638 | Preferably excluded from the present invention are one or | | |
| | more polynucleotides comprising a nucleotide sequence | | |
| | described by the general formula of a-b, where a is any | | |
| | integer between 1 to 3089 of SEQ ID NO:115, b is an integer | | |
| | of 15 to 3103, where both a and b correspond to the positions | | |
| | of nucleotide residues shown in SEQ ID NO:115, and where | | |
| | b is greater than or equal to a +14. | | |
| 734865 | Preferably excluded from the present invention are one or | AA126953, AA149347, AA160318, AA173765 | |
| | more polynucleotides comprising a nucleotide sequence | | |
| | described by the general formula of a-b, where a is any | | |
| | integer between 1 to 874 of SEQ ID NO:116, b is an integer | | |
| | of 15 to 888, where both a and b correspond to the positions | | |
| | of nucleotide residues shown in SEQ ID NO:116, and where | | |
| | b is greater than or equal to a +14. | | |
| 738846 | Preferably excluded from the present invention are one or | T59751, T60644, T89297, T90329, T90419, H64685, N74880 | |
| | more polynucleotides comprising a nucleotide sequence | | |
| | described by the general formula of a-b, where a is any | | |
| | integer between 1 to 432 of SEQ ID NO:117, b is an integer | | |
| | of 15 to 446, where both a and b correspond to the positions | | |
| | of nucleotide residues shown in SEQ ID NO:117, and where | | |
| | b is greater than or equal to a +14. | | |
| 740584 | Preferably excluded from the present invention are one or | | |
| | more polynucleotides comprising a nucleotide sequence | | |
| | described by the general formula of a-b, where a is any | | |
| | integer between 1 to 250 of SEQ ID NO:118, b is an integer | | |
| | of 15 to 264, where both a and b correspond to the positions | | |
| | of nucleotide residues shown in SEQ ID NO:118, and where | | |
| | b is greater than or equal to a +14. | | |
| 741213 | Preferably excluded from the present invention are one or | | |
| | more polynucleotides comprising a nucleotide sequence | | |
| | described by the general formula of a-b, where a is any | | |
| | integer between 1 to 557 of SEQ ID NO:119, b is an integer | | |
| | of 15 to 571, where both a and b correspond to the positions | | |
| | of nucleotide residues shown in SEQ ID NO:119, and where | | |
| | b is greater than or equal to a +14. | | |
| 741229 | Preferably excluded from the present invention are one or | | |
| | more polynucleotides comprising a nucleotide sequence | | |
| | described by the general formula of a-b, where a is any | | |
| | integer between 1 to 1285 of SEQ ID NO:120, b is an integer | | |
| | of 15 to 1299, where both a and b correspond to the positions | | |
| | of nucleotide residues shown in SEQ ID NO:120, and where | | |
| is greater than or equal to a +14. | | | |
| 741299 | Preferably excluded from the present invention are one or | | |
| | more polynucleotides comprising a nucleotide sequence | | |
| | described by the general formula of a-b, where a is any | | |
| | integer between 1 to 1635 of SEQ ID NO:121, his an integer | | |
| | of 15 to 1649, where both a and b correspond to the positions | | |
| | of nucleotide residues shown in SEQ ID NO:121, and where | | |
| | b is greater than or equal to a +14. | | |
| 743134 | Preferably excluded from the present invention are one or | | |
| | more polynucleotides comprising a nucleotide sequence | | |
| | described by the general formula of a-b, where a is any | | |
| | integer between 1 to 2771 of SEQ ID NO:122, b is an integer | | |
| | of 15 to 2785, where both a and b correspond to the positions | | |
| | of nucleotide residues shown in SEQ ID NO:122, and where | | |
| | b is greater than or equal to a +14. | | |
| 744680 | Preferably excluded from the present invention are one or | | |
| | more polynucleotides comprising a nucleotide sequence | | |
| | described by the general formula of a-b, where a is any | | |
| | integer between 1 to 1954 of SEQ ID NO:123, b is an integer | | |
| | of 15 to 1968, where both a and b correspond to the positions | | |
| | of nucleotide residues shown in SEQ ID NO:123, and where | | |
| | is greater than or equal to a +14. | | |
| 744705 | Preferably excluded from the present invention are one or | R87645, N24592, N24957, N25844, N30699, N33738, N41313, W61296, | |
| | more polynucleotides comprising a nucleotide sequence | W65392, AA029407, AA029406, AA037259, AA199742, AA199790 | |
| | described by the general formula of a-b, where a is any | | |
| | integer between 1 to 1691 of SEQ ID NO:124, b is an integer | | |
| | of 15 to 1705, where both a and b correspond to the positions | | |
| | of nucleotide residues shown in SEQ ID NO:124, and where | | |
| | b is greater than or equal to a +14. | | |
| 745337 | Preferably excluded from the present invention are one or | T40398, T41245, T26513, T26514, T26515, R50522, R51530, R51531, | |
| | more polynucleotides comprising a nucleotide sequence | R52099, R52195, H15883, H40745, H45530, 1145531, H49233, H49234, | |
| | described by the general formula of a-b, where a is any | H51160, H61211, H62117, H93148, N29189, N48350, N49126, | |
| | integer between 1 to 2367 of SEQ ID NO:125, b is an integer | N66819, N71954, N99689, W48612, W67303, W67419, AA025497, | |
| | of 15 to 2381, where both a and b correspond to the positions | AA040666, AA046266, AA046345, AA053465, AA053234, AA074556, | |
| | of nucleotide residues shown in SEQ ID NO:125, and where | AA074528, AA075941, AA079527, AA084953, AA132753, AA132802, | |
| | is greater than or equal to a +14. | AA159029, AA159030, AA159169, AA159274, AA160752, AA262679, | |
| | | A427433, AA427688 | |
| 745570 | Preferably excluded from the present invention are one or | T55379, T78988, T95100, R23674, R61397, R61442, R73724, R75646, | |
| | more polynucleotides comprising a nucleotide sequence | R75752, R79492, N59852, N673 15, N70855, W06865, W24675, W78989, | |
| | described by the general formula of a-b, where a is any | W78873, W80595, W94313, AA031905, AA032006, AA042987, AA043041, | |
| | integer between 1 to 1699 of SEQ ID NO:126, b is an integer | AA081690, AA460259, AA463823 | |
| | of 15 to 1713, where both a and b correspond to the positions | | |
| | of nucleotide residues shown in SEQ ID NO:126, and where | | |
| | is greater than or equal to a +14. | | |
| 746078 | Preferably excluded from the present invention are one or | | |
| | more polynucleotides comprising a nucleotide sequence | | |
| | described by the general formula of a-b, where a is any | | |
| | integer between 1 to 1500 of SEQ ID NO:127, b is an integer | | |
| | of 15 to 1514, where both a and b correspond to the positions | | |
| | of nucleotide residues shown in SEQ ID NO:127, and where | | |
| | b is greater than or equal to a +14. | | |
| 750595 | Preferably excluded from the present invention are one or | R38607, R46103, R46103, R55827, R56073, H05009, H05010, H05764, | |
| | more polynucleotides comprising a nucleotide sequence | H05871, H70717, N22562, N50960, N66199, N75783, W32323, W32654, | |
| | described by the general formula of a-b, where a is any | AA115520, AA114922, AA161333, AA253251, AA460716, AA460890 | |
| | integer between 1 to 2035 of SEQ ID NO:128, b is an integer | | |
| | of 15 to 2049, where both a and b correspond to the positions | | |
| | of nucleotide residues shown in SEQ ID NO:128, and where | | |
| | is greater than or equal to a +14. | | |
| 750633 | Preferably excluded from the present invention are one or | | |
| | more polynucleotides comprising a nucleotide sequence | | |
| | described by the general formula of a-b, where a is any | | |
| | integer between 1 to 1252 of SEQ ID NO:129, b is an integer | | |
| | of 15 to 1266, where both a and b correspond to the positions | | |
| | of nucleotide residues shown in SEQ ID NO:129, and where | | |
| | b is greater than or equal to a +14. | | |
| 750766 | Preferably excluded from the present invention are one or | T61022, T61574, N743 15, N98348, N985 17, W05223, W31082, W42972, | |
| | more polynucleotides comprising a nucleotide sequence | W42973, W69783, W69731, AA029869, AA029316, AA040718, AA040719, | |
| | described by the general formula of a-b, where a is any | AA148660, AA148661, AA150953, AA151043, AA181851, AA186586, | |
| | integer between 1 to 1081 of SEQ ID NO:130, b is an integer | AA197153, AA197137, AA463512 | |
| | of 15 to 1095, where both a and b correspond to the positions | | |
| | of nucleotide residues shown in SEQ ID NO:130, and where | | |
| | b is greater than or equal to a +14. | | |
| 752225 | Preferably excluded from the present invention are one or | | |
| | more polynucleotides comprising a nucleotide sequence | | |
| | described by the general formula of a-b, where a is any | | |
| | integer between 1 to 2876 of SEQ ID NO:131, b is an integer | | |
| | of 15 to 2890, where both a and b correspond to the positions | | |
| | of nucleotide residues shown in SEQ ID NO:131, and where | | |
| | b is greater than or equal to a +14. | | |
| 754538 | Preferably excluded from the present invention are one or | | |
| | more polynucleotides comprising a nucleotide sequence | | |
| | described by the general formula of a-b, where a is any | | |
| | integer between 1 to 553 of SEQ ID NO:132, b is an integer | | |
| | of 15 to 567, where both a and b correspond to the positions | | |
| | of nucleotide residues shown in SEQ ID NO:132, and where | | |
| | b is greater than or equal to a +14. | | |
| 754820 | Preferably excluded from the present invention are one or | | |
| | more polynucleotides comprising a nucleotide sequence | | |
| | described by the general formula of a-b, where a is any | | |
| | integer between 1 to 772 of SEQ ID NO:133, b is an integer | | |
| | of 15 to 786, where both a and b correspond to the positions | | |
| | of nucleotide residues shown in SEQ ID NO:133, and where | | |
| | is greater than or equal to a +14. | | |
| 756565 | Preferably excluded from the present invention are one or | R19918, R23647, N50210, W31589, W81698, AA172287, AA173866 | |
| | more polynucleotides comprising a nucleotide sequence | | |
| | described by the general formula of a-b, where a is any | | |
| | integer between 1 to 1207 of SEQ ID NO:134, b is an integer | | |
| | of 15 to 1221, where both a and b correspond to the positions | | |
| | of nucleotide residues shown in SEQ ID NO:134, and where | | |
| | b is greater than or equal to a +14. | | |
| 756793 | Preferably excluded from the present invention are one or | | |
| | more polynucleotides comprising a nucleotide sequence | | |
| | described by the general formula of a-b, where a is any | | |
| | integer between 1 to 1907 of SEQ ID NO:135, b is an integer | | |
| | of 15 to 1921, where both a and b correspond to the positions | | |
| | of nucleotide residues shown in SEQ ID NO:135, and where | | |
| | b is greater than or equal to a +14. | | |
| 757431 | Preferably excluded from the present invention are one or | T61971, R11782, R51982, R51981, H24532, H42326, H42923, H38029, | |
| | more polynucleotides comprising a nucleotide sequence | H95132, N77240, N78638, N81066, W07134, W16665, W19796, W42604, | |
| | described by the general formula of a-b, where a is any | W42607, W46765, W67123, W68839, W69749, W69856, AA019415, | |
| | integer between 1 to 989 of SEQ ID NO:136, b is an integer | AA039588, AA039589, AA055454, AA101116, AA129779, AA148487, | |
| | of 15 to 1003, where both a and b correspond to the positions | AA148486, AA188297, AA251345, AA251440, AA430079 | |
| | of nucleotide residues shown in SEQ ID NO:136, and where | | |
| | b is greater than or equal to a +14. | | |
| 757478 | Preferably excluded from the present invention are one or | | |
| | more polynucleotides comprising a nucleotide sequence | | |
| | described by the general formula of a-b, where a is any | | |
| | integer between 1 to 864 of SEQ ID NO:137, b is an integer | | |
| | of 15 to 878, where both a and b correspond to the positions | | |
| | of nucleotide residues shown in SEQ ID NO:137, and where | | |
| | is greater than or equal to a +14. | | |
| 757695 | Preferably excluded from the present invention are one or | | |
| | more polynucleotides comprising a nucleotide sequence | | |
| | described by the general formula of a-b, where a is any | | |
| | integer between 1 to 2491 of SEQ ID NO:138, b is an integer | | |
| | of 15 to 2505, where both a and b correspond to the positions | | |
| | of nucleotide residues shown in SEQ ID NO:138, and where | | |
| | b is greater than or equal to a +14. | | |
| 760876 | Preferably excluded from the present invention are one or | | |
| | more polynucleotides comprising a nucleotide sequence | | |
| described by the general formula of a-b, where a is any | | | |
| | integer between 1 to 258 of SEQ ID NO:139, b is an integer | | |
| | of 15 to 272, where both a and b correspond to the positions | | |
| | of nucleotide residues shown in SEQ ID NO:139, and where | | |
| b is greater than or equal to a +14. | | | |
| 761528 | Preferably excluded from the present invention are one or | T61999, T62191, N57708, N59676, AA001349, AA001982, AA464252, | |
| | more polynucleotides comprising a nucleotide sequence A464360 | | |
| | described by the general formula of a-b, where a is any | | |
| | integer between 1 to 1578 of SEQ ID NO:140, b is an integer | | |
| | of 15 to 1592, where both a and b correspond to the positions | | |
| | of nucleotide residues shown in SEQ ID NO:140, and where | | |
| | b is greater than or equal to a +14. | | |
| 761936 | Preferably excluded from the present invention are one or | | |
| | more polynucleotides comprising a nucleotide sequence | | |
| | described by the general formula of a-b, where a is any | | |
| | integer between 1 to 828 of SEQ ID NO:141, b is an integer | | |
| | of 15 to 842, where both a and b correspond to the positions | | |
| | of nucleotide residues shown in SEQ ID NO:141, and where | | |
| | b is greater than or equal to a +14. | | |
| 761944 | Preferably excluded from the present invention are one or | | |
| | more polynucleotides comprising a nucleotide sequence | | |
| | described by the general formula of a-b, where a is any | | |
| | integer between 1 to 3189 of SEQ ID NO:142, b is an integer | | |
| | of 15 to 3203, where both a and b correspond to the positions | | |
| | of nucleotide residues shown in SEQ ID NO:142, and where | | |
| | b is greater than or equal to a +14. | | |
| 764913 | Preferably excluded from the present invention are one or | | |
| | more polynucleotides comprising a nucleotide sequence | | |
| | described by the general formula of a-b, where a is any | | |
| | integer between 1 to 3460 of SEQ ID NO:143, b is an integer | | |
| | of 15 to 3474, where both a and b correspond to the positions | | |
| | of nucleotide residues shown in SEQ ID NO:143, and where | | |
| | b is greater than or equal to a +14. | | |
| 764941 Preferably excluded from the present invention are one or | R23682, R25571, R40976, R44135, R40976, R44135, R62882, R63815, | | |
| | more polynucleotides comprising a nucleotide sequence | R64423, H05633, H12992, H13863, H13918, H19024, H19316, H22903, | |
| | described by the general formula of a-b, where a is any | H24291, H25927, H27667, H27668, H28317, H28318, H39907, R85243, | |
| | integer between 1 to 3269 of SEQ ID NO:144, b is an integer | R93863, R98771, R98772, H57201, N27777, N62312, N65975, N79067, | |
| | of 15 to 3283, where both a and b correspond to the positions | N94237,N98931, W19838,W24064, W31159, W40175,W56611, W60342, | |
| | of nucleotide residues shown in SEQ ID NO:144, and where | W81204, W81206, W81207, W93359, W93447, AA037481, AA121685, | |
| | b is greater than or equal to a +14. | AA199815, AA199905, AA224144, AA224298, AA226800, AA233529, | |
| | | AA460353, AA419114, AA419149 | |
| 765903 | Preferably excluded from the present invention are one or | R13305, R40788, R50797, R50915, R40788, R56524, R59696, R60018, | |
| | more polynucleotides comprising a nucleotide sequence | H09347, H09407, H19221, H51737, H73641, H73642, H90518, H90614, | |
| | described by the general formula of a-b, where a is any | N44279, N45966, N51825, N52967, W15394, W58520, W78069, AA040801, | |
| | integer between 1 to 1804 of SEQ ID NO:145, b is an integer | AA041239, AA193309, AA194263, AA425331, AA428477 | |
| | of 15 to 1818, where both a and b correspond to the positions | | |
| | of nucleotide residues shown in SEQ ID NO:145, and where | | |
| | b is greater than or equal to a +14. | | |
| 766122 | Preferably excluded from the present invention are one or | | |
| | more polynucleotides comprising a nucleotide sequence | | |
| | described by the general formula of a-b, where a is any | | |
| | integer between 1 to 500 of SEQ ID NO:146, b is an integer | | |
| | of 15 to 514, where both a and b correspond to the positions | | |
| | of nucleotide residues shown in SEQ ID NO:146, and where | | |
| | b is greater than or equal to a +14. | | |
| 766719 | Preferably excluded from the present invention are one or | T61333, T52655, T69392, T70444, T72342, T72383, T92195, T94967, T87463, | |
| | more polynucleotides comprising a nucleotide sequence | R11623, R12048, T78115, T78851, T79946, T83322, T96968, T97079, | |
| | described by the general formula of a-b, where a is any | T97411, R18454, R21014, R21442, R23107, R23108, R23221, R35121, | |
| | integer between 1 to 2521 of SEQ ID NO:147, b is an integer | R37110, R38010, R38400, R41312, R49509, R52450, R41312, R49509, | |
| | of 15 to 2535, where both a and b correspond to the positions | R56650, R56651, R63015, R66787, R68818, R68926, R69892, R74178, | |
| | of nucleotide residues shown in SEQ ID NO:147, and where | R74263, R77115, R77116, R79241, H00340, H00401, H02817, H02818, | |
| | b is greater than or equal to a +14. | H03234, H12313, H12366, H21082, H21083, H21575, H39686, H43389, | |
| | | H45308, H47274, H47506, R85441, R89072, R89172, R91233, R92017, | |
| | | R92062, R93635, R93790, R97298, R97323, H63388, H63440, H67848, | |
| | | H68634, H70208, H73093, H73906, H74098, H73454, H77851, H77903, | |
| | | H89736, H89799, H96012, H96999, H97208, H97750, H98624, N25144, | |
| | | N40991, N41793, N45001, N53013, N63728, N66887, N67316, N76307, | |
| | | N92620, N93546, N98219, N99033, W01073, W20158, W21151, W42485, | |
| | | W42532, W44556, W44547, W46274, W46275, W46293, W46760, W46907, | |
| | | W53017, W57643, W74262, W79876, AA028145, AA028182, AA028896, | |
| | | AA037086, AA043121, AA043969, AA190453, AA191396, AA193355, | |
| | | AA194390, AA194476, AA461330 | |
| 767655 | Preferably excluded from the present invention are one or | | |
| | more polynucleotides comprising a nucleotide sequence | | |
| | described by the general formula of a-b, where a is any | | |
| | integer between 1 to 2301 of SEQ ID NO:148, b is an integer | | |
| | of 15 to 2315, where both a and b correspond to the positions | | |
| | of nucleotide residues shown in SEQ ID NO:148, and where | | |
| | b is greater than or equal to a +14. | | |
| 767941 | Preferably excluded from the present invention are one or | | |
| | more polynucleotides comprising a nucleotide sequence | | |
| | described by the general formula of a-b, where a is any | | |
| | integer between 1 to 2590 of SEQ ID NO:149, b is an integer | | |
| | of 15 to 2604, where both a and b correspond to the positions | | |
| | of nucleotide residues shown in SEQ ID NO:149, and where | | |
| | b is greater than or equal to a +14. | | |
| 768035 | Preferably excluded from the present invention are one or | R14455, R69813, N57212 | |
| | more polynucleotides comprising a nucleotide sequence | | |
| | described by the general formula of a-b, where a is any | | |
| | integer between 1 to 671 of SEQ ID NO:150, b is an integer | | |
| | of 15 to 685, where both a and b correspond to the positions | | |
| | of nucleotide residues shown in SEQ ID NO:150, and where | | |
| | b is greater than or equal to a +14. | | |
| 769888 | Preferably excluded from the present invention are one or | | |
| | more polynucleotides comprising a nucleotide sequence | | |
| | described by the general formula of a-b, where a is any | | |
| | integer between 1 to 1089 of SEQ ID NO:151, b is an integer | | |
| | of 15 to 1103, where both a and b correspond to the positions | | |
| | of nucleotide residues shown in SEQ ID NO:151, and where | | |
| | b is greater than or equal to a +14. | | |
| 771671 | Preferably excluded from the present invention are one or | | |
| | more polynucleotides comprising a nucleotide sequence | | |
| | described by the general formula of a-b, where a is any | | |
| | integer between 1 to 1103 of SEQ ID NO:152, b is an integer | | |
| | of 15 to 1117, where both a and b correspond to the positions | | |
| | of nucleotide residues shown in SEQ ID NO:152, and where | | |
| | b is greater than or equal to a +14. | | |
| 772876 | Preferably excluded from the present invention are one or | H48052, H70779, H70778, W55869, AA024474, AA128713, AA158771 | |
| | more polynucleotides comprising a nucleotide sequence | | |
| | described by the general formula of a-b, where a is any | | |
| | integer between 1 to 2024 of SEQ ID NO:153, b is an integer | | |
| | of 15 to 2038, where both a and b correspond to the positions | | |
| | of nucleotide residues shown in SEQ ID NO:153, and where | | |
| | b is greater than or equal to a +14. | | |
| 773150 | Preferably excluded from the present invention are one or | | |
| | more polynucleotides comprising a nucleotide sequence | | |
| | described by the general formula of a-b, where a is any | | |
| | integer between 1 to 631 of SEQ ID NO:154, b is an integer | | |
| | of 15 to 645, where both a and b correspond to the positions | | |
| | of nucleotide residues shown in SEQ ID NO:154, and where | | |
| | b is greater than or equal to a +14. | | |
| 773398 | Preferably excluded from the present invention are one or | W63659, AA080975, AA121709, AA126836, AA127584, AA134406, | |
| | more polynucleotides comprising a nucleotide sequence | AA147005, AA160159, AA164695, AA165611, AA171799, AA233065 | |
| | described by the general formula of a-b, where a is any | | |
| | integer between 1 to 1582 of SEQ ID NO:155, b is an integer | | |
| | of 15 to 1596, where both a and b correspond to the positions | | |
| | of nucleotide residues shown in SEQ ID NO:155, and where | | |
| | b is greater than or equal to a +14. | | |
| 773647 | Preferably excluded from the present invention are one or | | |
| | more polynucleotides comprising a nucleotide sequence | | |
| | described by the general formula of a-b, where a is any | | |
| | integer between 1 to 1640 of SEQ ID NO:156, b is an integer | | |
| | of 15 to 1654, where both a and b correspond to the positions | | |
| | of nucleotide residues shown in SEQ ID NO:156, and where | | |
| | is greater than or equal to a +14. | | |
| 773927 | Preferably excluded from the present invention are one or | | |
| | more polynucleotides comprising a nucleotide sequence | | |
| | described by the general formula of a-b, where a is any | | |
| | integer between 1 to 1801 of SEQ ID NO:157, b is an integer | | |
| | of 15 to 1815, where both a and b correspond to the positions | | |
| | of nucleotide residues shown in SEQ ID NO:157, and where | | |
| | b is greater than or equal to a +14. | | |
| 774100 | Preferably excluded from the present invention are one or | T90757, R17008, R18310, R98163, N94386, W21282, W55964, AA037125, | |
| | more polynucleotides comprising a nucleotide sequence | AA081882, AA135947, AA136510, AA155940 | |
| | described by the general formula of a-b, where a is any | | |
| | integer between 1 to 1383 of SEQ ID NO:158, b is an integer | | |
| | of 15 to 1397, where both a and b correspond to the positions | | |
| | of nucleotide residues shown in SEQ ID NO:158, and where | | |
| | b is greater than or equal to a +14. | | |
| 774101 | Preferably excluded from the present invention are one or | R39231, R42286, R42286, H21387, H21430, H23195, N62733, N66184, | |
| | more polynucleotides comprising a nucleotide sequence | N78457, N80264, N99178, AA045207, AA133141, AA135395, AA135659, | |
| | described by the general formula of a-b, where a is any | AA135672, AA165439, AA165438, AA418539 | |
| | integer between 1 to 942 of SEQ ID NO:159, b is an integer | | |
| | of 15 to 956, where both a and b correspond to the positions | | |
| | of nucleotide residues shown in SEQ ID NO:159, and where | | |
| | b is greater than or equal to a +14. | | |
| 774159 | Preferably excluded from the present invention are one or | | |
| | more polynucleotides comprising a nucleotide sequence | | |
| | described by the general formula of a-b, where a is any | | |
| | integer between 1 to 2251 of SEQ ID NO:160, b is an integer | | |
| | of 15 to 2265, where both a and b correspond to the positions | | |
| | of nucleotide residues shown in SEQ ID NO:160, and where | | |
| | b is greater than or equal to a +14. | | |
| 774341 | Preferably excluded from the present invention are one or | | |
| | more polynucleotides comprising a nucleotide sequence | | |
| | described by the general formula of a-b, where a is any | | |
| | integer between 1 to 984 of SEQ ID NO:161, b is an integer | | |
| | of 15 to 998, where both a and b correspond to the positions | | |
| | of nucleotide residues shown in SEQ ID NO:161, and where | | |
| | b is greater than or equal to a +14. | | |
| 774371 | Preferably excluded from the present invention are one or | | |
| | more polynucleotides comprising a nucleotide sequence | | |
| | described by the general formula of a-b, where a is any | | |
| | integer between 1 to 1736 of SEQ ID NO:162, b is an integer | | |
| | of 15 to 1750, where both a and b correspond to the positions | | |
| | of nucleotide residues shown in SEQ ID NO:162, and where | | |
| | b is greater than or equal to a +14. | | |
| 777534 | Preferably excluded from the present invention are one or | T64606, T66246, R11978, R00627, R13377, R14039, R56458, R60447, | |
| | more polynucleotides comprising a nucleotide sequence | R62230, R64606, R72959, R73576, R81926, H29425, H60246, H85563, | |
| | described by the general formula of a-b, where a is any | N29906, N36864, N42958, N46134, W15640, W39775, N90323, AA007317, | |
| | integer between 1 to 3082 of SEQ ID NO:163, b is an integer | AA021093, AA026823, AA026955, AA034103, AA064957, AA075106, | |
| | of 15 to 3096, where both a and b correspond to the positions | AA113409, AA134171, AA134170, AA136815, AA159636 | |
| | of nucleotide residues shown in SEQ ID NO:163, and where | | |
| | b is greater than or equal to a +14. | | |
| 777623 | Preferably excluded from the present invention are one or | | |
| | more polynucleotides comprising a nucleotide sequence | | |
| | described by the general formula of a-b, where a is any | | |
| | integer between 1 to 1202 of SEQ ID NO:164, b is an integer | | |
| | of 15 to 1216, where both a and b correspond to the positions | | |
| | of nucleotide residues shown in SEQ ID NO:164, and where | | |
| | b is greater than or equal to a +14. | | |
| 779194 | Preferably excluded from the present invention are one or | | |
| | more polynucleotides comprising a nucleotide sequence | | |
| | described by the general formula of a-b, where a is any | | |
| | integer between 1 to 766 of SEQ ID NO:165, b is an integer | | |
| | of 15 to 780, where both a and b correspond to the positions | | |
| | of nucleotide residues shown in SEQ ID NO:165, and where | | |
| | b is greater than or equal to a +14. | | |
| 779387 | Preferably excluded from the present invention are one or | T47850, T70030, T70097, T97303, T97417, R26372, R27996, R28099, | |
| | more polynucleotides comprising a nucleotide sequence | R48027, R76100, R76151, R78969, H01122, H01123, H69526, H69981, | |
| | described by the general formula of a-b, where a is any | H88816, H88817, H88817, H99882, N28568, N36017, N36801, N45965, | |
| | integer between 1 to 3366 of SEQ ID NO:166, b is an integer | W39683, W44987, W46393, W47394, W47424, W52700, AA035254, | |
| | of 15 to 3380, where both a and b correspond to the positions | AA035500, AA035102, AA039488, AA039489, AA069554, AA099394, | |
| | of nucleotide residues shown in SEQ ID NO:166, and where | AA099515, AA130160, AA147727, AA157616, AA182043, AA190771, | |
| | is greater than or equal to a +14. | AA191381, AA232291, AA233456, AA233496, AA234039, AA236285, | |
| | | AA427888, AA427971 | |
| 779790 | Preferably excluded from the present invention are one or | | |
| | more polynucleotides comprising a nucleotide sequence | | |
| | described by the general formula of a-b, where a is any | | |
| | integer between 1 to 1631 of SEQ ID NO:167, b is an integer | | |
| | of 15 to 1645, where both a and b correspond to the positions | | |
| | of nucleotide residues shown in SEQ ID NO:167, and where | | |
| | b is greater than or equal to a +14. | | |
| 779818 | Preferably excluded from the present invention are one or | T80350, AA172153 | |
| | more polynucleotides comprising a nucleotide sequence | | |
| | described by the general formula of a-b, where a is any | | |
| | integer between 1 to 1134 of SEQ ID NO:168, b is an integer | | |
| | of 15 to 1148, where both a and b correspond to the positions | | |
| | of nucleotide residues shown in SEQ ID NO:168, and where | | |
| | b is greater than or equal to a +14. | | |
| 779819 | Preferably excluded from the present invention are one or | T53889, T54036, T56942, T56943, T64670, T67876, T68027, T69603, T69675, | |
| | more polynucleotides comprising a nucleotide sequence | T72245, R13 895, R37729, R39041, R66644, R67363, H61695, H61696, | |
| | described by the general formula of a-b, where a is any | H79871, H79872, H94755, N54393, N70849, N76357, W06839, W67873, | |
| | integer between 1 to 2049 of SEQ ID NO:169, b is an integer | W67874, W94734, AA036740, AA041382, AA062758, AA171946, AA464456 | |
| | of 15 to 2063, where both a and b correspond to the positions | | |
| | of nucleotide residues shown in SEQ ID NO:169, and where | | |
| | b is greater than or equal to a +14. | | |
| 780634 | Preferably excluded from the present invention are one or | T91261, R37843, R37928, R51931, R74365, R74367, H00839, H01223, | |
| | more polynucleotides comprising a nucleotide sequence | N66989, W31896, W39259, AA251009, AA251479, AA262830, AA418381, | |
| | described by the general formula of a-b, where a is any | AA418534 | |
| | integer between 1 to 2902 of SEQ ID NO:170, b is an integer | | |
| | of 15 to 2916, where both a and b correspond to the positions | | |
| | of nucleotide residues shown in SEQ ID NO:170, and where | | |
| | b is greater than or equal to a +14. | | |
| 780638 | Preferably excluded from the present invention are one or | | |
| | more polynucleotides comprising a nucleotide sequence | | |
| | described by the general formula of a-b, where a is any | | |
| | integer between 1 to 2515 of SEQ ID NO:171, b is an integer | | |
| | of 15 to 2529, where both a and b correspond to the positions | | |
| | of nucleotide residues shown in SEQ ID NO:171, and where | | |
| | b is greater than or equal to a +14. | | |
| 780773 | Preferably excluded from the present invention are one or | T94203, R26771, R31421, R31436, R37199, R77716, R77727, R78060, | |
| | more polynucleotides comprising a nucleotide sequence | R79203, R79205, R79469, R79472, H20928, H43091, H44086, H44174, | |
| | described by the general formula of a-b, where a is any | N27827, N48150, N48678, N49710, N49816, N53296, N72238, N92833, | |
| | integer between 1 to 797 of SEQ ID NO:172, b is an integer | W32965, W75970, AA046240, AA122068, AA182933 | |
| | of 15 to 811, where both a and b correspond to the positions | | |
| | of nucleotide residues shown in SEQ ID NO:172, and where | | |
| | b is greater than or equal to a +14. | | |
| 780778 | Preferably excluded from the present invention are one or | T93197, R63521, R63567, H03648, H03649, H63542, H63585, H71373, | |
| | more polynucleotides comprising a nucleotide sequence | H84876, H85286, H87956, H88009, H88232, H88344, N24216, N25549, | |
| | described by the general formula of a-b, where a is any | N34146, W85792, AA084961, AA084960, AA088785, AA100682 | |
| | integer between 1 to 2207 of SEQ ID NO:173, b is an integer | | |
| | of 15 to 2221, where both a and b correspond to the positions | | |
| | of nucleotide residues shown in SEQ ID NO:173, and where | | |
| | b is greater than or equal to a +14. | | |
| 780873 | Preferably excluded from the present invention are one or | T80944, R64627, R64628, R70696, R70697, R71119, R71300, H03131, | |
| | more polynucleotides comprising a nucleotide sequence | R94989, R98519, R98545, H60772, H82562, H89214, N31387, N70670, | |
| | described by the general formula of a-b, where a is any | N77981, W58445, W58480, AA046891, AA046892, AA465001 | |
| | integer between 1 to 743 of SEQ ID NO:174, b is an integer | | |
| | of 15 to 757, where both a and b correspond to the positions | | |
| | of nucleotide residues shown in SEQ ID NO:174, and where | | |
| | b is greater than or equal to a +14. | | |
| 782113 | Preferably excluded from the present invention are one or | | |
| | more polynucleotides comprising a nucleotide sequence | | |
| | described by the general formula of a-b, where a is any | | |
| | integer between 1 to 2207 of SEQ ID NO:175, b is an integer | | |
| | of 15 to 2221, where both a and b correspond to the positions | | |
| | of nucleotide residues shown in SEQ ID NO:175, and where | | |
| | b is greater than or equal to a +14. | | |
| 782153 | Preferably excluded from the present invention are one or | T73302, T73365, R24876, R36231, R36232, R68235, R68528, R73630, | |
| | more polynucleotides comprising a nucleotide sequence | R75759, H28780, H28756, H69128, H69129, N22916, N31304, N38744, | |
| | described by the general formula of a-b, where a is any | N48381, W02714, W15469, W25572, W37894, W37954, W39623, W60018, | |
| | integer between 1 to 1499 of SEQ ID NO:176,b is an integer AA026689, AA026700, AA187498, AA188108, AA187980, AA261951 | | |
| | of 15 to 1513, where both a and b correspond to the positions | | |
| | of nucleotide residues shown in SEQ ID NO:176, and where | | |
| | b is greater than or equal to a +14. | | |
| 782376 | Preferably excluded from the present invention are one or | | |
| | more polynucleotides comprising a nucleotide sequence | | |
| | described by the general formula of a-b, where a is any | | |
| | integer between 1 to 4069 of SEQ ID NO:177, b is an integer | | |
| | of 15 to 4083, where both a and b correspond to the positions | | |
| | of nucleotide residues shown in SEQ ID NO:177, and where | | |
| | b is greater than or equal to a +14. | | |
| 782420 | Preferably excluded from the present invention are one or | | |
| | more polynucleotides comprising a nucleotide sequence | | |
| | described by the general formula of a-b, where a is any | | |
| | integer between 1 to 2718 of SEQ ID NO:178, b is an integer | | |
| | of 15 to 2732, where both a and b correspond to the positions | | |
| | of nucleotide residues shown in SEQ ID NO:178, and where | | |
| | b is greater than or equal to a +14. | | |
| 782672 | Preferably excluded from the present invention are one or | R33945, H97542, W93819, AA227573, AA227882, AA460150, AA460748 | |
| | more polynucleotides comprising a nucleotide sequence | | |
| | described by the general formula of a-b, where a is any | | |
| | integer between 1 to 858 of SEQ ID NO:179, b is an integer | | |
| | of 15 to 872, where both a and b correspond to the positions | | |
| | of nucleotide residues shown in SEQ ID NO:179, and where | | |
| | b is greater than or equal to a +14. | | |
| 783148 | Preferably excluded from the present invention are one or | | |
| | more polynucleotides comprising a nucleotide sequence | | |
| | described by the general formula of a-b, where a is any | | |
| | integer between 1 to 2237 of SEQ ID NO:180, b is an integer | | |
| | of 15 to 2251, where both a and b correspond to the positions | | |
| | of nucleotide residues shown in SEQ ID NO:180, and where | | |
| | b is greater than or equal to a +14. | | |
| 783510 | Preferably excluded from the present invention are one or | | |
| | more polynucleotides comprising a nucleotide sequence | | |
| | described by the general formula of a-b, where a is any | | |
| | integer between 1 to 2775 of SEQ ID NO:181, b is an integer | | |
| | of 15 to 2789, where both a and b correspond to the positions | | |
| | of nucleotide residues shown in SEQ ID NO:181, and where | | |
| | b is greater than or equal to a +14. | | |
| 783734 | Preferably excluded from the present invention are one or | | |
| | more polynucleotides comprising a nucleotide sequence | | |
| | described by the general formula of a-b, where a is any | | |
| | integer between 1 to 3503 of SEQ ID NO:182, b is an integer | | |
| | of 15 to 3517, where both a and b correspond to the positions | | |
| | of nucleotide residues shown in SEQ ID NO:182, and where | | |
| | b is greater than or equal to a +14. | | |
| 784201 | Preferably excluded from the present invention are one or | | |
| | more polynucleotides comprising a nucleotide sequence | | |
| | described by the general formula of a-b, where a is any | | |
| | integer between 1 to 844 of SEQ ID NO:183, b is an integer | | |
| | of 15 to 858, where both a and b correspond to the positions | | |
| | of nucleotide residues shown in SEQ ID NO:183, and where | | |
| | b is greater than or equal to a +14. | | |
| 784381 | Preferably excluded from the present invention are one or | | |
| | more polynucleotides comprising a nucleotide sequence | | |
| | described by the general formula of a-b, where a is any | | |
| | integer between 1 to 2373 of SEQ ID NO:184, b is an integer | | |
| | of 15 to 2387, where both a and b correspond to the positions | | |
| | of nucleotide residues shown in SEQ ID NO:184, and where | | |
| | b is greater than or equal to a +14. | | |
| 784387 | Preferably excluded from the present invention are one or | R32962, R65669, R70746, R80363, H06027, H11579, H84180, AA010747, | |
| | more polynucleotides comprising a nucleotide sequence | AA074888, AA223293 | |
| | described by the general formula of a-b, where a is any | | |
| | integer between 1 to 2871 of SEQ ID NO:185, b is an integer | | |
| | of 15 to 2885, where both a and b correspond to the positions | | |
| | of nucleotide residues shown in SEQ ID NO:185, and where | | |
| | b is greater than or equal to a +14. | | |
| 784639 | Preferably excluded from the present invention are one or | | |
| | mmore polynucleotides comprising a nucleotide sequence | | |
| | described by the general formula of a-b, where a is any | | |
| | integer between 1 to 2164 of SEQ ID NO:186, b is an integer | | |
| | of 15 to 2178, where both a and b correspond to the positions | | |
| | of nucleotide residues shown in SEQ ID NO:186, and where | | |
| | b is greater than or equal to a +14. | | |
| 784641 | Preferably excluded from the present invention are one or | | |
| | more polynucleotides comprising a nucleotide sequence | | |
| | described by the general formula of a-b, where a is any | | |
| | integer between 1 to 1240 of SEQ ID NO:187, b is an integer | | |
| | of 15 to 1254, where both a and b correspond to the positions | | |
| | of nucleotide residues shown in SEQ ID NO:187, and where | | |
| | b is greater than or equal to a +14. | | |
| 785053 | Preferably excluded from the present invention are one or | | |
| | more polynucleotides comprising a nucleotide sequence | | |
| | described by the general formula of a-b, where a is any | | |
| | integer between 1 to 1465 of SEQ ID NO:188, b is an integer | | |
| | of 15 to 1479, where both a and b correspond to the positions | | |
| | of nucleotide residues shown in SEQ ID NO:188, and where | | |
| | b is greater than or equal to a +14. | | |
| 785142 | Preferably excluded from the present invention are one or | | |
| | more polynucleotides comprising a nucleotide sequence | | |
| | described by the general formula of a-b, where a is any | | |
| | integer between 1 to 3397 of SEQ ID NO:189, b is an integer | | |
| | of 15 to 3411, where both a and b correspond to the positions | | |
| | of nucleotide residues shown in SEQ ID NO:189, and where | | |
| | b is greater than or equal to a +14. | | |
| 785584 | Preferably excluded from the present invention are one or | | |
| | more polynucleotides comprising a nucleotide sequence | | |
| | described by the general formula of a-b, where a is any | | |
| | integer between 1 to 2603 of SEQ ID NO:190, b is an integer | | |
| | of 15 to 2617, where both a and b correspond to the positions | | |
| | of nucleotide residues shown in SEQ ID NO:190, and where | | |
| | b is greater than or equal to a +14. | | |
| 785795 | Preferably excluded from the present invention are one or | | |
| | more polynucleotides comprising a nucleotide sequence | | |
| | described by the general formula of a-b, where a is any | | |
| | integer between 1 to 3130 of SEQ ID NO:191, b is an integer | | |
| | of 15 to 3144, where both a and b correspond to the positions | | |
| | of nucleotide residues shown in SEQ ID NO:191, and where | | |
| | b is greater than or equal to a +14. | | |
| 786283 | Preferably excluded from the present invention are one or | | |
| | more polynucleotides comprising a nucleotide sequence | | |
| | described by the general formula of a-b, where a is any | | |
| | integer between 1 to 2556 of SEQ ID NO:192, b is an integer | | |
| | of 15 to 2570, where both a and b correspond to the positions | | |
| | of nucleotide residues shown in SEQ ID NO:192, and where | | |
| | b is greater than or equal to a +14. | | |
| 786335 | Preferably excluded from the present invention are one or | | |
| | more polynucleotides comprising a nucleotide sequence | | |
| | described by the general formula of a-b, where a is any | | |
| | integer between 1 to 1510 of SEQ ID NO:193, b is an integer | | |
| | of 15 to 1524, where both a and b correspond to the positions | | |
| | of nucleotide residues shown in SEQ ID NO:193, and where | | |
| | b is greater than or equal to a +14. | | |
| 786511 | Preferably excluded from the present invention are one or | | |
| | more polynucleotides comprising a nucleotide sequence | | |
| | described by the general formula of a-b, where a is any | | |
| | integer between 1 to 1664 of SEQ ID NO:194, b is an integer | | |
| | of 15 to 1678, where both a and b correspond to the positions | | |
| | of nucleotide residues shown in SEQ ID NO:194, and where | | |
| | b is greater than or equal to a +14. | | |
| 787330 | Preferably excluded from the present invention are one or | | |
| | more polynucleotides comprising a nucleotide sequence | | |
| | described by the general formula of a-b, where a is any | | |
| | integer between 1 to 2810 of SEQ ID NO:195, b is an integer | | |
| | of 15 to 2824, where both a and b correspond to the positions | | |
| | of nucleotide residues shown in SEQ ID NO:195, and where | | |
| | b is greater than or equal to a +14. | | |
| 787377 | Preferably excluded from the present invention are one or | T56159, T63 176, T65462, T87530, T87531, T90458, T83039, T83977, T84180, | |
| | more polynucleotides comprising a nucleotide sequence | R13022, H23316, H40518, R88510, R91571, H62310, H73670, H73413, | |
| | described by the general formula of a-b, where a is any | H77723, H81660, N32679, N44824, N50589, N55310, N64096, N69880, | |
| | integer between 1 to 4246 of SEQ ID NO:196, b is an integer | N92004, N99388, W90426, W90148, AA151077, AA179970, AA180462, | |
| | of 15 to 4260, where both a and b correspond to the positions | AA195170, AA195270, AA195707, AA195744, AA425027 | |
| | of nucleotide residues shown in SEQ ID NO:196, and where | | |
| | b is greater than or equal to a +14. | | |
| 787662 | Preferably excluded from the present invention are one or | | |
| | more polynucleotides comprising a nucleotide sequence | | |
| | described by the general formula of a-b, where a is any | | |
| | integer between 1 to 3103 of SEQ ID NO:197, b is an integer | | |
| | of 15 to 3117, where both a and b correspond to the positions | | |
| | of nucleotide residues shown in SEQ ID NO:197, and where | | |
| | b is greater than or equal to a +14. | | |
| 788754 | Preferably excluded from the present invention are one or | | |
| | more polynucleotides comprising a nucleotide sequence | | |
| | described by the general formula of a-b, where a is any | | |
| | integer between 1 to 2469 of SEQ ID NO:198, b is an integer | | |
| | of 15 to 2483, where both a and b correspond to the positions | | |
| | of nucleotide residues shown in SEQ ID NO:198, and where | | |
| | b is greater than or equal to a +14. | | |
| 789351 | Preferably excluded from the present invention are one or | | |
| | more polynucleotides comprising a nucleotide sequence | | |
| | described by the general formula of a-b, where a is any | | |
| | integer between 1 to 1224 of SEQ ID NO:199, b is an integer | | |
| | of 15 to 1238, where both a and b correspond to the positions | | |
| | of nucleotide residues shown in SEQ ID NO:199, and where | | |
| | b is greater than or equal to a +14. | | |
| 789466 | Preferably excluded from the present invention are one or | N62718, AA211883, AA252981 | |
| | more polynucleotides comprising a nucleotide sequence | | |
| | described by the general formula of a-b, where a is any | | |
| | integer between 1 to 626 of SEQ ID NO:200, b is an integer | | |
| | of 15 to 640, where both a and b correspond to the positions | | |
| | of nucleotide residues shown in SEQ ID NO:200, and where | | |
| | b is greater than or equal to a +14. | | |
| 790396 | Preferably excluded from the present invention are one or | | |
| | more polynucleotides comprising a nucleotide sequence | | |
| | described by the general formula of a-b, where a is any | | |
| | integer between 1 to 1425 of SEQ ID NO:201, b is an integer | | |
| | of 15 to 1439, where both a and b correspond to the positions | | |
| | of nucleotide residues shown in SEQ ID NO:201, and where | | |
| | b is greater than or equal to a +14. | | |
| 791673 | Preferably excluded from the present invention are one or | | |
| | more polynucleotides comprising a nucleotide sequence | | |
| | described by the general formula of a-b, where a is any | | |
| | integer between 1 to 1233 of SEQ ID NO:202, b is an integer | | |
| | of 15 to 1247, where both a and b correspond to the positions | | |
| | of nucleotide residues shown in SEQ ID NO:202, and where | | |
| | b is greater than or equal to a +14. | | |
| 792080 | Preferably excluded from the present invention are one or | T80259, N44613 | |
| | more polynucleotides comprising a nucleotide sequence | | |
| | described by the general formula of a-b, where a is any | | |
| | integer between 1 to 732 of SEQ ID NO:203, b is an integer | | |
| | of 15 to 746, where both a and b correspond to the positions | | |
| | of nucleotide residues shown in SEQ ID NO:203, and where | | |
| | b is greater than or equal to a +14. | | |
| 793025 | Preferably excluded from the present invention are one or | | |
| | more polynucleotides comprising a nucleotide sequence | | |
| | described by the general formula of a-b, where a is any | | |
| | integer between 1 to 2156 of SEQ ID NO:204, b is an integer | | |
| | of 15 to 2170, where both a and b correspond to the positions | | |
| | of nucleotide residues shown in SEQ ID NO:204, and where | | |
| | b is greater than or equal to a +14. | | |
| 793043 | Preferably excluded from the present invention are one or | | |
| | more polynucleotides comprising a nucleotide sequence | | |
| | described by the general formula of a-b, where a is any | | |
| | integer between 1 to 2606 of SEQ ID NO:205, b is an integer | | |
| | of 15 to 2620, where both a and b correspond to the positions | | |
| | of nucleotide residues shown in SEQ ID NO:205, and where | | |
| | b is greater than or equal to a +14. | | |
| 793386 | Preferably excluded from the present invention are one or | | |
| | more polynucleotides comprising a nucleotide sequence | | |
| | described by the general formula of a-b, where a is any | | |
| | integer between 1 to 1000 of SEQ ID NO:206, b is an integer | | |
| | of 15 to 1014, where both a and b correspond to the positions | | |
| | of nucleotide residues shown in SEQ ID NO:206, and where | | |
| | b is greater than or equal to a +14. | | |
| 795144 | Preferably excluded from the present invention are one or | | |
| | more polynucleotides comprising a nucleotide sequence | | |
| | described by the general formula of a-b, where a is any | | |
| | integer between 1 to 1353 of SEQ ID NO:207, b is an integer | | |
| | of 15 to 1367, where both a and b correspond to the positions | | |
| | of nucleotide residues shown in SEQ ID NO:207, and where | | |
| | b is greater than or equal to a +14. | | |
| 795911 | Preferably excluded from the present invention are one or | T40041, R75763, H07057, H43863, H53392, H71544, H84663, N28804, | |
| | more polynucleotides comprising a nucleotide sequence | N94279, W19740, AA017623, AA057111, AA058918, AA195576 | |
| | described by the general formula of a-b, where a is any | | |
| | integer between 1 to 1484 of SEQ ID NO:208, b is an integer | | |
| | of 15 to 1498, where both a and b correspond to the positions | | |
| | of nucleotide residues shown in SEQ ID NQ;208, and where | | |
| | b is greater than or equal to a +14. | | |
| 795962 | Preferably excluded from the present invention are one or | | |
| | more polynucleotides comprising a nucleotide sequence | | |
| | described by the general formula of a-b, where a is any | | |
| | integer between 1 to 2351 of SEQ ID NO:209, b is an integer | | |
| | of 15 to 2365, where both a and b correspond to the positions | | |
| | of nucleotide residues shown in SEQ ID NO:209, and where | | |
| | is greater than or equal to a +14. | | |
| 796221 | Preferably excluded from the present invention are one or | | |
| | more polynucleotides comprising a nucleotide sequence | | |
| | described by the general formula of a-b, where a is any | | |
| | integer between 1 to 996 of SEQ ID NO:210, b is an integer | | |
| | of 15 to 1010, where both a and b correspond to the positions | | |
| | of nucleotide residues shown in SEQ ID NO:210, and where | | |
| | b is greater than or equal to a +14. | | |
| 796283 | Preferably excluded from the present invention are one or | | |
| | more polynucleotides comprising a nucleotide sequence | | |
| | described by the general formula of a-b, where a is any | | |
| | integer between 1 to 1534 of SEQ ID NO:211, b is an integer | | |
| | of 15 to 1548, where both a and b correspond to the positions | | |
| | of nucleotide residues shown in SEQ ID NO:211, and where | | |
| | b is greater than or equal to a +14. | | |
| 796392 | Preferably excluded from the present invention are one or | | |
| | more polynucleotides comprising a nucleotide sequence | | |
| | described by the general formula of a-b, where a is any | | |
| | integer between 1 to 1515 of SEQ ID NO:212, b is an integer | | |
| | of 15 to 1529, where both a and b correspond to the positions | | |
| | of nucleotide residues shown in SEQ ID NO:212, and where | | |
| | b is greater than or equal to a +14. | | |
| 797655 | Preferably excluded from the present invention are one or | | |
| | more polynucleotides comprising a nucleotide sequence | | |
| | described by the general formula of a-b, where a is any | | |
| | integer between 1 to 2561 of SEQ ID NO:213, b is an integer | | |
| | of 15 to 2575, where both a and b correspond to the positions | | |
| | of nucleotide residues shown in SEQ ID NO:213, and where | | |
| | b is greater than or equal to a +14. | | |
| 799486 | Preferably excluded from the present invention are one or | | |
| | more polynucleotides comprising a nucleotide sequence | | |
| | described by the general formula of a-b, where a is any | | |
| | integer between 1 to 2026 of SEQ ID NO:214, b is an integer | | |
| | of 15 to 2040, where both a and b correspond to the positions | | |
| | of nucleotide residues shown in SEQ ID NO:214, and where | | |
| | b is greater than or equal to a +14. | | |
| 799681 | Preferably excluded from the present invention are one or | | |
| | more polynucleotides comprising a nucleotide sequence | | |
| | described by the general formula of a-b, where a is any | | |
| | integer between 1 to 310 of SEQ ID NO:215, b is an integer | | |
| | of 15 to 324, where both a and b correspond to the positions | | |
| | of nucleotide residues shown in SEQ ID NO:215, and where | | |
| | b is greater than or equal to a +14. | | |
| 800221 | Preferably excluded from the present invention are one or | | |
| | more polynucleotides comprising a nucleotide sequence | | |
| | described by the general formula of a-b, where a is any | | |
| | integer between 1 to 1461 of SEQ ID NO:216, b is an integer | | |
| | of 15 to 1475, where both a and b correspond to the positions | | |
| | of nucleotide residues shown in SEQ ID NO:216, and where | | |
| | b is greater than or equal to a +14. | | |
| 800376 | Preferably excluded from the present invention are one or | | |
| | more polynucleotides comprising a nucleotide sequence | | |
| | described by the general formula of a-b, where a is any | | |
| | integer between 1 to 1373 of SEQ ID NO:217, b is an integer | | |
| | of 15 to 1387, where both a and b correspond to the positions | | |
| | of nucleotide residues shown in SEQ ID NO:217, and where | | |
| | b is greater than or equal to a +14. | | |
| 800567 | Preferably excluded from the present invention are one or | | |
| | more polynucleotides comprising a nucleotide sequence | | |
| | described by the general formula of a-b, where a is any | | |
| | integer between 1 to 1819 of SEQ ID NO:218, b is an integer | | |
| | of 15 to 1833, where both a and b correspond to the positions | | |
| | of nucleotide residues shown in SEQ ID NO:218, and where | | |
| | b is greater than or equal to a +14. | | |
| 800652 | Preferably excluded from the present invention are one or | | |
| | more polynucleotides comprising a nucleotide sequence | | |
| | described by the general formula of a-b, where a is any | | |
| | integer between 1 to 2578 of SEQ ID NO:219, b is an integer | | |
| | of 15 to 2592, where both a and b correspond to the positions | | |
| | of nucleotide residues shown in SEQ ID NO:219, and where | | |
| | b is greater than or equal to a +14. | | |
| 800748 | Preferably excluded from the present invention are one or | | |
| | more polynucleotides comprising a nucleotide sequence | | |
| | described by the general formula of a-b, where a is any | | |
| | integer between 1 to 2390 of SEQ ID NO:220, b is an integer | | |
| | of 15 to 2404, where both a and b correspond to the positions | | |
| | of nucleotide residues shown in SEQ ID NO:220, and where | | |
| | b is greater than or equal to a +14. | | |
| 802032 | Preferably excluded from the present invention are one or | | |
| | more polynucleotides comprising a nucleotide sequence | | |
| | described by the general formula of a-b, where a is any | | |
| | integer between 1 to 2656 of SEQ ID NO:221, b is an integer | | |
| | of 15 to 2670, where both a and b correspond to the positions | | |
| | of nucleotide residues shown in SEQ ID NO:221, and where | | |
| | b is greater than or equal to a +14. | | |
| 802050 | Preferably excluded from the present invention are one or | T53455, T53456, T64307, T64694, T71011, T71073, R09951, R12591, | |
| | more polynucleotides comprising a nucleotide sequence | R18956, R22898, R23000, R24702, R25196, R27761, R27844, R43964, | |
| | described by the general formula of a-b, where a is any | R46320, R54857, R54866, R43964, R60214, R60448, R69089, R69203, | |
| | integer between 1 to 1742 of SEQ ID NO:222, b is an integer | R70698, R70699, R71940, R72061, R73121, R73174, H22669, H22686, | |
| | of 15 to 1756, where both a and b correspond to the positions | H25678, H27383, H27962, H27963, H28646, H29871, H29967, H39890, | |
| | of nucleotide residues shown in SEQ ID NO:222, and where | H37770, H44247, H44701, H45421, R83508, R83540, R88432, H65089, | |
| | b is greater than or equal to a +14. | H65136, H82626, H82627, H83486, H83487, H84231, H84553, H85813, | |
| | | H86051, H86914, H86915, H87763, H87812, H92048, H92218, H92310, | |
| | | H92366, H93438, H94153, H94253, H95552, H96048, H96410, N78955, | |
| | | N80229, N95017, N99227, W17349, W23863, W37217, W37556, W38519, | |
| | | AA000983, AA000984, AA001124, AA001178, AA012816, AA012817, | |
| | | AA012821, AA012837, AA013129, AA013296, AA013322, AA015870, | |
| | | AA016173, AA016172, AA016244, AA017427, AA017532, AA017510, | |
| | | AA017650, AA018432, AA018433, AA018668, AA018669, AA018788, | |
| | | AA018789, AA018932, AA018933, AA018800, AA019295, AA019296, | |
| | | AA019616, AA019634, AA019820, AA021468, AA021467, AA021555, | |
| | | AA020761, AA036874, AA040654, AA046028, AA046080, AA047875, | |
| | | AA054063, AA054205, AA053997, AA058827, AA058954, AA059096, | |
| | | AA059097, AA121321, AA121453, AA425728, AA427798 | |
| 805551 | Preferably excluded from the present invention are one or | | |
| | more polynucleotides comprising a nucleotide sequence | | |
| | described by the general formula of a-b, where a is any | | |
| | integer between 1 to 2365 of SEQ ID NO:223, b is an integer | | |
| | of 15 to 2379, where both a and b correspond to the positions | | |
| | of nucleotide residues shown in SEQ ID NO:223, and where | | |
| | b is greater than or equal to a +14. | | |
| 805662 | Preferably excluded from the present invention are one or | | |
| | more polynucleotides comprising a nucleotide sequence | | |
| | described by the general formula of a-b, where a is any | | |
| | integer between 1 to 2497 of SEQ ID NO:224, b is an integer | | |
| | of 15 to 2511, where both a and b correspond to the positions | | |
| | of nucleotide residues shown in SEQ ID NO:224, and where | | |
| | b is greater than or equal to a +14. | | |
| 805750 | Preferably excluded from the present invention are one or | | |
| | more polynucleotides comprising a nucleotide sequence | | |
| | described by the general formula of a-b, where a is any | | |
| | integer between 1 to 587 of SEQ ID NO:225, b is an integer | | |
| | of 15 to 601, where both a and b correspond to the positions | | |
| | of nucleotide residues shown in SEQ ID NO:225, and where | | |
| | b is greater than or equal to a +14. | | |
| 805860 | Preferably excluded from the present invention are one or | | |
| | more polynucleotides comprising a nucleotide sequence | | |
| | described by the general formula of a-b, where a is any | | |
| | integer between 1 to 493 of SEQ ID NO:226, b is an integer | | |
| | of 15 to 507, where both a and b correspond to the positions | | |
| | of nucleotide residues shown in SEQ ID NO:226, and where | | |
| | b is greater than or equal to a +14. | | |
| 805886 | Preferably excluded from the present invention are one or | | |
| | more polynucleotides comprising a nucleotide sequence | | |
| | described by the general formula of a-b, where a is any | | |
| | integer between 1 to 1027 of SEQ ID NO:227, b is an integer | | |
| | of 15 to 1041, where both a and b correspond to the positions | | |
| | of nucleotide residues shown in SEQ ID NO:227, and where | | |
| | b is greater than or equal to a +14. | | |
| 806706 | Preferably excluded from the present invention are one or | | |
| | more polynucleotides comprising a nucleotide sequence | | |
| | described by the general formula of a-b, where a is any | | |
| | integer between 1 to 1644 of SEQ ID NO:228, b is an integer | | |
| | of 15 to 1658, where both a and b correspond to the positions | | |
| | of nucleotide residues shown in SEQ ID NO:228, and where | | |
| | b is greater than or equal to a +14. | | |
| 811637 | Preferably excluded from the present invention are one or | T59548, T59503, T61640, R47891, R53382, R69888, R78209, H11069, | |
| | more polynucleotides comprising a nucleotide sequence | H49549, H70903, H70985, H85798, H88010, H88233, H89244, H70903, | |
| | described by the general formula of a-b, where a is any | N48638, N67235, W16765, W44942, W72288, W76314, AA010071, | |
| | integer between 1 to 1602 of SEQ ID NO:229, b is an integer | AA013237, AA013331, AA018680, AA102724, AA132323, AA143684, | |
| | of 15 to 1616, where both a and b correspond to the positions | AA173703, AA213813, AA213892, AA214580, AA223769, AA256832 | |
| | of nucleotide residues shown in SEQ ID NO:229, and where | | |
| | b is greater than or equal to a +14. | | |
| 811782 | Preferably excluded from the present invention are one or | | |
| | more polynucleotides comprising a nucleotide sequence | | |
| | described by the general formula of a-b, where a is any | | |
| | integer between 1 to 1914 of SEQ ID NO:230, b is an integer | | |
| | of 15 to 1928, where both a and b correspond to the positions | | |
| | of nucleotide residues shown in SEQ ID NO:230, and where | | |
| | b is greater than or equal to a +14. | | |
| 812338 | Preferably excluded from the present invention are one or | R14488, H20945 , H85272, N36641, W52527 | |
| | more polynucleotides comprising a nucleotide sequence | | |
| | described by the general formula of a-b, where a is any | | |
| | integer between 1 to 1221 of SEQ ID NO:231, b is an integer | | |
| | of 15 to 1235, where both a and b correspond to the positions | | |
| | of nucleotide residues shown in SEQ ID NO:231, and where | | |
| | b is greater than or equal to a +14. | | |
| 812439 | Preferably excluded from the present invention are one or | | |
| | more polynucleotides comprising a nucleotide sequence | | |
| | described by the general formula of a-b, where a is any | | |
| | integer between 1 to 2533 of SEQ ID NO:232, b is an integer | | |
| | of 15 to 2547, where both a and b correspond to the positions | | |
| | of nucleotide residues shown in SEQ ID NO:232, and where | | |
| | b is greater than or equal to a +14. | | |
| 812645 | Preferably excluded from the present invention are one or | T47861, T56070, T51490, T53266, T56036, T62925, T63268, T63920, T65968, | |
| | more polynucleotides comprising a nucleotide sequence | T90499, T92798, T94959, T95012, R62607, R62656, R72831, R73017, | |
| | described by the general formula of a-b, where a is any | R73018, R73285, H03018, H04300, H25930, H25956, H26558, H28208, | |
| | integer between 1 to 990 of SEQ ID NO:233, b is an integer | H43607, H44636, H44649, H45454, H45544, R92028, R97989, N49912, | |
| | of 15 to 1004, where both a and b correspond to the positions | N55253, N76103, N76860, N91838, W23759, W73482, W94362, W94471, | |
| | of nucleotide residues shown in SEQ ID NO:233, and where | N89886, AA046695, AA187153, AA187175 | |
| | b is greater than or equal to a +14. | | |
| 812770 | Preferably excluded from the present invention are one or | T39754, T39831, T39352, T62702, T92238, T92280, T92968, T94256, T86698, | |
| | more polynucleotides comprising a nucleotide sequence | T86793, T88969, R08026, R09266, T99878, R18049, R19212, R21573, | |
| | described by the general formula of a-b, where a is any | R21599, R65715, H21005, H25255, H48018, R83571, H51996, H62745, | |
| | integer between 1 to 2096 of SEQ ID NO:234, b is an integer | H63322, H71550, H73155, H73631, H78047, H78489, H85242, H84914, | |
| | of 15 to 2110, where both a and b correspond to the positions | H95643, N25403, N25830, N39488, N44902, N45050, N72391, N79701, | |
| | of nucleotide residues shown in SEQ ID NO:234, and where | N94855, W02622, W03117, W04789, W30780, W31119, W31146, W44536, | |
| | b is greater than or equal to a +14. | W57915, W67327, W68227, W72924, W79796, W94218, W92184, AA029874, | |
| | | AA041265, AA070556, AA070987, AA071217, AA075110, AA075613, | |
| | | AA084227, AA086143, AA126166, AA127661, AA135577, AA135557, | |
| | | AA135653, AA136492, AA172281, AA180259, AA180507, AA192889, | |
| | | AA211798, AA427386 | |
| 812893 | Preferably excluded from the present invention are one or | | |
| | more polynucleotides comprising a nucleotide sequence | | |
| | described by the general formula of a-b, where a is any | | |
| | integer between 1 to 3514 of SEQ ID NO:235, b is an integer | | |
| | of 15 to 3528, where both a and b correspond to the positions | | |
| | of nucleotide residues shown in SEQ ID NO:235, and where | | |
| | b is greater than or equal to a +14. | | |
| 813080 | Preferably excluded from the present invention are one or | | |
| | more polynucleotides comprising a nucleotide sequence | | |
| | described by the general formula of a-b, where a is any | | |
| | integer between 1 to 524 of SEQ ID NO:236, b is an integer | | |
| | of 15 to 538, where both a and b correspond to the positions | | |
| | of nucleotide residues shown in SEQ ID NO:236, and where | | |
| | b is greater than or equal to a +14. | | |
| 813139 | Preferably excluded from the present invention are one or | T80022, T80132, H57912, H61357 | |
| | more polynucleotides comprising a nucleotide sequence | | |
| | described by the general formula of a-b, where a is any | | |
| | integer between 1 to 2014 of SEQ ID NO:237, b is an integer | | |
| | of 15 to 2028, where both a and b correspond to the positions | | |
| | of nucleotide residues shown in SEQ ID NO:237, and where | | |
| | b is greater than or equal to a +14. | | |
| 815326 | Preferably excluded from the present invention are one or | | |
| | more polynucleotides comprising a nucleotide sequence | | |
| | described by the general formula of a-b, where a is any | | |
| | integer between 1 to 1501 of SEQ ID NO:238, b is an integer | | |
| | of 15 to 1515, where both a and b correspond to the positions | | |
| | of nucleotide residues shown in SEQ ID NO:238, and where | | |
| | b is greater than or equal to a +14. | | |
| 815740 | Preferably excluded from the present invention are one or | 48264, T58091, T94419, T94506, H21757, H99081, N26947, N36795, | |
| | more polynucleotides comprising a nucleotide sequence | N45955, N66570, N70184, N98830, W32113, W32171, W55906, W55927, | |
| | described by the general formula of a-b, where a is any | W61339, W60040, W80432, W80562, W81101, AA025239, AA026026, | |
| | integer between 1 to 1714 of SEQ ID NO:239, b is an integer | AA046321, AA046146, AA204703 | |
| | of 15 to 1728, where both a and b correspond to the positions | | |
| | of nucleotide residues shown in SEQ ID NO:239, and where | | |
| | b is greater than or equal to a +14. | | |
| 815812 | Preferably excluded from the present invention are one or | T90521, R07475, R07526, T98792, T98793, R45273, R52676, R45273, | |
| | more polynucleotides comprising a nucleotide sequence | R59860, R61768, H07859, H08666, H38684, R83910, R83909, H59038, | |
| | described by the general formula of a-b, where a is any | 59037,1163995, H64043, H67088, H67624, N26301, N32125, N33562, | |
| | integer between 1 to 1103 of SEQ ID NO:240, b is an integer 41543, N56792, AA010140, AA010139, AA011662, AA011709, AA044827, | | |
| | of 15 to 1117, where both a and b correspond to the positions A129084, AA151918, AA173794 | | |
| | of nucleotide residues shown in SEQ ID NO:240, and where | | |
| | b is greater than or equal to a +14. | | |
| 824865 | Preferably excluded from the present invention are one or | T49439, T49440, T74012, R05533, R05643, R71805, R79363, R79364, | |
| | more polynucleotides comprising a nucleotide sequence | R91535, H61048, H61610, H66233, H69618, H70463, H70613, H70890, | |
| | described by the general formula of a-b, where a is any | H71293, H78547, H81120, H91295, H91390, N57962, N64309, N70328, | |
| | integer between 1 to 2357 of SEQ ID NO:241, b is an integer | N71483, N74460, N99513, W02797, W03055, N91438, AA022995, | |
| | of 15 to 2371, where both a and b correspond to the positions | AA022463, AA151573, AA151722 | |
| | of nucleotide residues shown in SEQ ID NO:241, and where | | |
| | b is greater than or equal to a +14. | | |
| 825138 | Preferably excluded from the present invention are one or | | |
| | more polynucleotides comprising a nucleotide sequence | | |
| | described by the general formula of a-b, where a is any | | |
| | integer between 1 to 3262 of SEQ ID NO:242, b is an integer | | |
| | of 15 to 3276, where both a and b correspond to the positions | | |
| | of nucleotide residues shown in SEQ ID NO:242, and where | | |
| | b is greater than or equal to a +14. | | |
| 825535 | Preferably excluded from the present invention are one or | | |
| | more polynucleotides comprising a nucleotide sequence | | |
| | described by the general formula of a-b, where a is any | | |
| | integer between 1 to 722 of SEQ ID NO:243, b is an integer | | |
| | of 15 to 736, where both a and b correspond to the positions | | |
| | of nucleotide residues shown in SEQ ID NO:243, and where | | |
| | b is greater than or equal to a +14. | | |
| 826203 | Preferably excluded from the present invention are one or | | |
| | more polynucleotides comprising a nucleotide sequence | | |
| | described by the general formula of a-b, where a is any | | |
| | integer between 1 to 2297 of SEQ ID NO:244, b is an integer | | |
| | of 15 to 2311, where both a and b correspond to the positions | | |
| | of nucleotide residues shown in SEQ ID NO:244, and where | | |
| | b is greater than or equal to a +14. | | |
| 827046 | Preferably excluded from the present invention are one or | T63435, T63759, T87711, T94058, T94805, T94844, T94889, T86880, T86881, | |
| | more polynucleotides comprising a nucleotide sequence | T80042, R00243, R00352, R13034, R31385, R32380, R32381, R38760, | |
| | described by the general formula of a-b, where a is any | R40284, R40418, R51387, R51490, R40284, R40418, R71495, R71549, | |
| | integer between 1 to 4051 of SEQ ID NO:245, b is an integer | R77110, R77111, R81535, R81534, H02414, H04748, H04837, H05744, | |
| | of 15 to 4065, where both a and b correspond to the positions | H05850, H12437, H12438, H24410, H84506, H88056, H88079, H88080, | |
| | of nucleotide residues shown in SEQ ID NO:245, and where | H88266, H88520, H88523, H88561, H88567, H88811, H89242, H89243, | |
| | b is greater than or equal to a +14. | H89340, H89522, H88080, H88520, H88811, H89243, H89340, N22133, | |
| | | N30400, N47068, N50832, N62530, N63385, N66711, N66730, N66728, | |
| | | N67341, N67944, N71637, N71853, N71904, N79428, N66391, W01663, | |
| | | W25692, W56009, W56318, AA055188, AA055919, AA076369, AA076498, | |
| | | AA079647, AA079553, AA115543, AA115054, AA122371, AA121426, | |
| | | AA164879, AA164878, AA173652, AA173651, AA258324, AA258532, | |
| | | AA460643, AA460990, AA280874, AA280953, AA525305, AA525328, | |
| | | AA526641, AA552970, AA593665, AA570032, AA570417, AA572744, | |
| | | AA728803, AA728824, AA746917 | |
| 827168 | Preferably excluded from the present invention are one or | | |
| | more polynucleotides comprising a nucleotide sequence | | |
| | described by the general formula of a-b, where a is any | | |
| | integer between 1 to 1471 of SEQ ID NO:246, b is an integer | | |
| | of 15 to 1485, where both a and b correspond to the positions | | |
| | of nucleotide residues shown in SEQ ID NO:246, and where | | |
| | b is greater than or equal to a +14. | | |
| 827195 | Preferably excluded from the present invention are one or | T77108, R11986 | |
| | more polynucleotides comprising a nucleotide sequence | | |
| | described by the general formula of a-b, where a is any | | |
| | integer between 1 to 1472 of SEQ ID NO:247, b is an integer | | |
| | of 15 to 1486, where both a and b correspond to the positions | | |
| | of nucleotide residues shown in SEQ ID NO:247, and where | | |
| | b is greater than or equal to a +14. | | |
| 827249 | Preferably excluded from the present invention are one or | | |
| | more polynucleotides comprising a nucleotide sequence | | |
| | described by the general formula of a-b, where a is any | | |
| | integer between 1 to 1980 of SEQ ID NO:248, his an integer | | |
| | of 15 to 1994, where both a and b correspond to the positions | | |
| | of nucleotide residues shown in SEQ ID NO:248, and where | | |
| | b is greater than or equal to a +14. | | |
| 827447 | Preferably excluded from the present invention are one or | | |
| | more polynucleotides comprising a nucleotide sequence | | |
| | described by the general formula of a-b, where a is any | | |
| | integer between 1 to 1647 of SEQ ID NO:249, b is an integer | | |
| | of 15 to 1661, where both a and b correspond to the positions | | |
| | of nucleotide residues shown in SEQ ID NO:249, and where | | |
| | b is greater than or equal to a +14. | | |
| 827515 | Preferably excluded from the present invention are one or | | |
| | more polynucleotides comprising a nucleotide sequence | | |
| | described by the general formula of a-b, where a is any | | |
| | integer between 1 to 2344 of SEQ ID NO:250, b is an integer | | |
| | of 15 to 2358, where both a and b correspond to the positions | | |
| | of nucleotide residues shown in SEQ ID NO:250, and where | | |
| | b is greater than or equal to a +14. | | |
| 827621 | Preferably excluded from the present invention are one or | | |
| | more polynucleotides comprising a nucleotide sequence | | |
| | described by the general formula of a-b, where a is any | | |
| | integer between 1 to 683 of SEQ ID NO:251, b is an integer | | |
| | of 15 to 697, where both a and b correspond to the positions | | |
| | of nucleotide residues shown in SEQ ID NO:251, and where | | |
| | b is greater than or equal to a +14. | | |
| 827883 | Preferably excluded from the present invention are one or | | |
| | more polynucleotides comprising a nucleotide sequence | | |
| | described by the general formula of a-b, where a is any | | |
| | integer between 1 to 2944 of SEQ ID NO:252, b is an integer | | |
| | of 15 to 2958, where both a and b correspond to the positions | | |
| | of nucleotide residues shown in SEQ ID NO:252, and where | | |
| | b is greater than or equal to a +14. | | |
| 828040 | Preferably excluded from the present invention are one or | T78257, T81592, T83408, T98857, T99453, R24503, R24602, R34836, | |
| | more polynucleotides comprising a nucleotide sequence | R34932, R52437, R52501, R52500, H10205, H12773, H12827, H20540, | |
| | described by the general formula of a-b, where a is any | H20632, H40525, R92740, H51257, H51827, H78114, H78113, H93565, | |
| | integer between 1 to 2513 of SEQ ID NO:253, b is an integer | N30243, N30795, N41570, N57137, N67626, N71081, N75985, N76340, | |
| | of 15 to 2527, where both a and b correspond to the positions | W01320, W04402, W04410, W52430, W52471, W61358, W60048, AA040527, | |
| | of nucleotide residues shown in SEQ ID NO:253, and where | AA040528, AA044739, AA044794, AA133224, AA130908, AA130822, | |
| | b is greater than or equal to a +14. | AA142867, AA151675, AA151755, AA470461, AA524808, AA715484, | |
| | | AA720952, AA730460, AA912077, AA961362, AA961363 | |
| 828360 | Preferably excluded from the present invention are one or | T39184, T40461, T63411, T71316, T89154, T89248, R21853, R21870, | |
| | more polynucleotides comprising a nucleotide sequence | R22009, R22010, R33088, R33178, R51751, R66596, R70491, R70581, | |
| | described by the general formula of a-b, where a is any | R82639, R82684, H00709, H11650, H17014, H19338, H38138, H79933, | |
| | integer between 1 to 1169 of SEQ ID NO:254, b is an integer | H80766, H82262, H83318, H83679, N22884, N33281, N34791, N44515, | |
| | of 15 to 1183, where both a and b correspond to the positions | N52015, N54628, N64069, N64136, N74874, N74875, N92414, N92810, | |
| | of nucleotide residues shown in SEQ ID NO:254, and where | W01786, W05708, W19189, W19348, W24929, W42669, W45192, W46546, | |
| | b is greater than or equal to a +14. | W47392, W47422, W60251, W67177, W67178, W79541, W79622, W84535, | |
| | | W90125, W94769, W95205, AA027281, AA035333, AA035334, AA037062, | |
| | | AA041467, AA043350, AA044657, AA056021, AA056069, AA056757, | |
| | | AA058356, AA058435, AA084638, AA126486, AA126612, AA127391, | |
| | | AA127516, AA127573, AA127613, AA133186, AA133373, AA133313, | |
| | | AA131305, AA131548, AA134952, AA134902, AA148589, AA159517, | |
| | | | A172259, AA210910, AA210909 |
| 828506 | Preferably excluded from the present invention are one or | T46854, T51134, T63778, T63812, T70197, T94033, T94784, R11818, T78022, | |
| | more polynucleotides comprising a nucleotide sequence | T78185, T97720, T97823, T99847, R00419, R06015, R14242, R15768, | |
| | described by the general formula of a-b, where a is any | R16272, R22870, R24857, R24859, R36940, R37122, R38128, R40537, | |
| | integer between 1 to 2037 of SEQ ID NO:255, b is an integer | R40537, R64393, R66369, R66406, R67096, R67139, R69618, R69710, | |
| | of 15 to 2051, where both a and b correspond to the positions | R77468, R81558, R82623, H03456, H03540, H03681, H04772, H04868, | |
| | of nucleotide residues shown in SEQ ID NO:255, and where | H27957, R83222, R97633, R99738, H54239, H71042, H75761, H75896, | |
| | b is greater than or equal to a +14. | H77581, H83096, H83756, H87347, H87884, H90290, H90942, H94688, | |
| | | H95048, H99140, N21141, N23049, N24389, N24821, N25733, N28713, | |
| | | N33386, N35058, N35850, N36275, N36446, N36851, N41970, N45071, | |
| | | N46122, N46 168, N47026, N66222, N66465, N71931, N74548, N99686, | |
| | | W02943, W37106, W37807, W39258, W40485, W52921, W56441, W57563, | |
| | | W57776, W58586, W58587, W79329, W92948, W92949, AA011548, | |
| | | AA011527, AA023000, AA022467, AA024997, AA025209, AA025216, | |
| | | AA025227, AA025990, AA028003, AA033608, AA037401, AA039442, | |
| | | AA039443, AA043901, AA056925, AA057070, AA074081, AA083873, | |
| | | AA099028, AA112887, AA115001, AA114964, AA128132, AA125887, | |
| | | AA135310, AA136391, AA148227, AA149076, AA149077, AA148545, | |
| | | AA156636, AA160112, AA160113, AA169459, AA181734, AA187469, | |
| | | AA187626, AA189064, AA191260, AA191538, AA207172, AA207171, | |
| | | AA224359, AA226905, AA226915, AA235559, AA459908 | |
| 828517 | Preferably excluded from the present invention are one or | H15804,H18452, AA146592, AA149939, AA149892, AA160732, AA191608, | |
| | more polynucleotides comprising a nucleotide sequence | AA548983, AA554733, AA600759, AA865400, AA907885, AA954237 | |
| | described by the general formula of a-b, where a is any | | |
| | integer between 1 to 672 of SEQ ID NO:256, b is an integer | | |
| | of 15 to 686, where both a and b correspond to the positions | | |
| | of nucleotide residues shown in SEQ ID NO:256, and where | | |
| | b is greater than or equal to a +14. | | |
| 828898 | Preferably excluded from the present invention are one or | T61075, T91806, R09240, R09355, T99060, T99658, R07031, R07043, | |
| | more polynucleotides comprising a nucleotide sequence | R07075, R07102, R28642, R32575, R36973, R47863, R47864, H15908, | |
| | described by the general formula of a-b, where a is any | H16014, H19893, H40060, H44782, R92942, R92943, H59884, H59885, | |
| | integer between 1 to 2308 of SEQ ID NO:257, b is an integer | H67802, H68075, N58069, N64287, N71857, N72594, N98414, W02374, | |
| | of 15 to 2322, where both a and b correspond to the positions | W30702, W31135, W37192, W60618, AA045338, AA055209, AA055299, | |
| | of nucleotide residues shown in SEQ ID NO:257, and where | AA114871, AA114872, AA120998, AA122326, AA121537, AA127701, | |
| | b is greater than or equal to a +14. | AA156728, AA181228, AA181833, AA192414, AA192434, AA468743, | |
| | | AA468763, AA523325, AA523458, AA526457, AA533984, F16728, | |
| | | AA584430, AA601952, AA613639, AA570586, AA665254, AA728791, | |
| | | AA728810, AA729554, AA729948, AA736948, AA827503, AA863088, | |
| | | AA865405, AA872707, AA873211, AA877782, AA879306, AA886586, | |
| | | AA894507, AA908568, AA919045, AA939288, AA960779, AI053399, | |
| | | AI053494, AI053497, AI053505, AI053537, AI053548, AI053565, AI053578, | |
| | | AI053607, AI053632, AI053648, AI053687, AI053698, AI053723, AI053746, | |
| | | AI053750, AI053867, AI053875, AI053904, AI053976, AI054008, AI054040, | |
| | | AI054099, AI054098, AI054186, AI054207, AI054201, AI054218, AI054230, | |
| | | AI054262, AI054282, AI054295, AI054324, AI054347, AI054401, F18087, | |
| | | W92362, AA093600 | |
| 828959 | Preferably excluded from the present invention are one or | T49110, T49111, H03714, H45126, H45429, H88387, H88456, H88387, | |
| | more polynucleotides comprising a nucleotide sequence | N20209, N29249, N29276, N32771, N36721, N41772, N41777, N79003, | |
| | described by the general formula of a-b, where a is any | N92380, W15282, W19718, W24622, W58051, W58374, N89975, AA029669, | |
| | integer between 1 to 2247 of SEQ ID NO:258, b is an integer | AA181566, AA182461, AA186831, AA186832, AA460703, AA460878, | |
| | of 15 to 2261, where both a and b correspond to the positions | AA430595, AA430596, AA430747, AA557632, AA610311, AA687639, | |
| | of nucleotide residues shown in SEQ ID NO:258, and where | AA872173, AA887603, AA992459, N83579, AA642545, C20993, AA091179 | |
| | b is greater than or equal to a +14. | | |
| 829081 | Preferably excluded from the present invention are one or | | |
| | more polynucleotides comprising a nucleotide sequence | | |
| | described by the general formula of a-b, where a is any | | |
| | integer between 1 to 1360 of SEQ ID NO:259, b is an integer | | |
| | of 15 to 1374, where both a and b correspond to the positions | | |
| | of nucleotide residues shown in SEQ ID NO:259, and where | | |
| | b is greater than or equal to a +14. | | |
| 830069 | Preferably excluded from the present invention are one or | R98775, H86395, W03494, W21603, W39528, AA013007 | |
| | more polynucleotides comprising a nucleotide sequence | | |
| | described by the general formula of a-b, where a is any | | |
| | integer between 1 to 1944 of SEQ ID NO:260, b is an integer | | |
| | of 15 to 1958, where both a and b correspond to the positions | | |
| | of nucleotide residues shown in SEQ ID NO:260, and where | | |
| | b is greater than or equal to a +14. | | |
| 830109 | Preferably excluded from the present invention are one or | | |
| | more polynucleotides comprising a nucleotide sequence | | |
| | described by the general formula of a-b, where a is any | | |
| | integer between 1 to 2938 of SEQ ID NO:261, b is an integer | | |
| | of 15 to 2952, where both a and b correspond to the positions | | |
| | of nucleotide residues shown in SEQ ID NO:261, and where | | |
| | b is greater than or equal to a +14. | | |
| 830176 | Preferably excluded from the present invention are one or | T55657, T55577, R47955, R48067, R49934, R55193, R55196, R74030, | |
| | more polynucleotides comprising a nucleotide sequence | R74066, R74121, R74165, N39617, N46765, W52387, W53032, AA181872, | |
| | described by the general formula of a-b, where a is any | AA210720, AA235708, AA427672, AA428451, AA587689, AA593989, | |
| | integer between 1 to 1353 of SEQ ID NO:262, b is an integer | AA580508, AA738289, AA863320, AA985417 | |
| | of 15 to 1367, where both a and b correspond to the positions | | |
| | of nucleotide residues shown in SEQ ID NO:262, and where | | |
| | b is greater than or equal to a +14. | | |
| 830241 | Preferably excluded from the present invention are one or | T50395, T52656, T52657, T59679, T59815, T71267, T71401, T83949, R08594, | |
| | more polynucleotides comprising a nucleotide sequence | R08686, T82168, T85364, T85403, T85462, T99588, R19848, R23594, | |
| | described by the general formula of a-b, where a is any | R26150, R30987, R34212, R34329, R45949, R45949, R71572, R76884, | |
| | integer between 1 to 2972 of SEQ ID NO;263, b is an integer | R77046, R78812, R79310, R79674, R79863, R81331, R81582, H06174, | |
| | of 15 to 2986, where both a and b correspond to the positions | H06438, H09357, H09416, H78585, H78637, H93997, H95034, H96313, | |
| | of nucleotide residues shown in SEQ ID NO:263, and where | H98061, N22977, N31015, N32393, N33210, N40268, N41923, N55580, | |
| | b is greater than or equal to a +14. | N62347, N63268, N69012, N77082, N78438, N78878, N79109, N99916, | |
| | | W00679, W03474, W05350, W06941, W06854, W15351, W19918, W25292, | |
| | | W25298, W31697, W32150, W32002, W39443, W56864, W72121, W77845, | |
| | | N90421, N91264, AA131531, AA131605, AA150778, AA150886, AA165100, | |
| | | AA165080, AA164538, AA164685, AA226732, AA227473, AA533788, | |
| | | AA558790, AA738250, AA767460, AA808772, AA863422, AA876634, | |
| | | AA888217, AA902465, AA917896, AA948725, AA977275, AI083708, | |
| | | C01143, N90337 | |
| 830264 | Preferably excluded from the present invention are one or | | |
| | more polynucleotides comprising a nucleotide sequence | | |
| | described by the general formula of a-b, where a is any | | |
| | integer between 1 to 1013 of SEQ ID NO:264, b is an integer | | |
| | of 15 to 1027, where both a and b correspond to the positions | | |
| | of nucleotide residues shown in SEQ ID NO:264, and where | | |
| | b is greater than or equal to a +14. | | |
| 830402 | Preferably excluded from the present invention are one or | T48752, T48751, T93134, T93241, R34614, R34615, R77506, H27565, | |
| | more polynucleotides comprising a nucleotide sequence | H27647, W33042, W33093, W33104, AA034191, AA521157, AA552029, | |
| | described by the general formula of a-b, where a is any | AA878639, AI000768, AI052421 | |
| | integer between 1 to 1547 of SEQ ID NO:265, b is an integer | | |
| | of 15 to 1561, where both a and b correspond to the positions | | |
| | of nucleotide residues shown in SEQ ID NO:265, and where | | |
| | b is greater than or equal to a +14. | | |
| 830414 | Preferably excluded from the present invention are one or | | |
| | more polynucleotides comprising a nucleotide sequence | | |
| | described by the general formula of a-b, where a is any | | |
| | integer between 1 to 1572 of SEQ ID NO:266, b is an integer | | |
| | of 15 to 1586, where both a and b correspond to the positions | | |
| | of nucleotide residues shown in SEQ ID NO:266, and where | | |
| | b is greater than or equal to a +14. | | |
| 830444 | Preferably excluded from the present invention are one or | | |
| | more polynucleotides comprising a nucleotide sequence | | |
| | described by the general formula of a-b, where a is any | | |
| | integer between 1 to 758 of SEQ ID NO:267, b is an integer | | |
| | of 15 to 772, where both a and b correspond to the positions | | |
| | of nucleotide residues shown in SEQ ID NO:267, and where | | |
| | b is greater than or equal to a +14. | | |
| 830476 | Preferably excluded from the present invention are one or | | |
| | more polynucleotides comprising a nucleotide sequence | | |
| | described by the general formula of a-b, where a is any | | |
| | integer between 1 to 2468 of SEQ ID NO:268, b is an integer | | |
| | of 15 to 2482, where both a and b correspond to the positions | | |
| | of nucleotide residues shown in SEQ. ID NO:268, and where | | |
| | b is greater than or equal to a +14. | | |
| 830624 | Preferably excluded from the present invention are one or | | |
| | more polynucleotides comprising a nucleotide sequence | | |
| | described by the general formula of a-b, where a is any | | |
| | integer between 1 to 2480 of SEQ ID NO:269, b is an integer | | |
| | of 15 to 2494, where both a and b correspond to the positions | | |
| | of nucleotide residues shown in SEQ ID NO:269, and where | | |
| | b is greater than or equal to a +14. | | |
| 830643 | Preferably excluded from the present invention are one or | T58947, T58886, H05457, H07007, H14769, H15494, H43780, W47128, | |
| | more polynucleotides comprising a nucleotide sequence | W47090, AA236593, AA236594, AA278666, AA278197, AA280763, | |
| | described by the general formula of a-b, where a is any | AA552030, AA569812, AA570495, AA847858 | |
| | integer between 1 to 1813 of SEQ ID NO:270, b is an integer | | |
| | of 15 to 1827, where both a and b correspond to the positions | | |
| | of nucleotide residues shown in SEQ ID NO:270, and where | | |
| | b is greater than or equal to a +14. | | |
| 830714 | Preferably excluded from the present invention are one or | T66210, R54846, R54610, R80475, H11702, H89352, H89538, H89545, | |
| | more polynucleotides comprising a nucleotide sequence | H89352, N92237, AA088248, AA088648, AA152243, AA152209, AA232083, | |
| | described by the general formula of a-b, where a is any | AA232084, AA281189, AA288012, AA419484, AA419611, AA635556, | |
| | integer between 1 to 3712 of SEQ ID NO:271, b is an integer | AA658115, AA731115, AA767864, AA902794, AA922587, N84692 | |
| | of 15 to 3726, where both a and b correspond to the positions | | |
| | of nucleotide residues shown in SEQ ID NO:271, and where | | |
| | b is greater than or equal to a +14. | | |
| 830826 | Preferably excluded from the present invention are one or | | |
| | more polynucleotides comprising a nucleotide sequence | | |
| | described by the general formula of a-b, where a is any | | |
| | integer between 1 to 642 of SEQ ID NO:272, b is an integer | | |
| | of 15 to 656, where both a and b correspond to the positions | | |
| | of nucleotide residues shown in SEQ ID NO:272, and where | | |
| | b is greater than or equal to a +14. | | |
| 830888 | Preferably excluded from the present invention are one or | | |
| | more polynucleotides comprising a nucleotide sequence | | |
| | described by the general formula of a-b, where a is any | | |
| | integer between 1 to 1163 of SEQ ID NO:273, b is an integer | | |
| | of 15 to 1177, where both a and b correspond to the positions | | |
| | of nucleotide residues shown in SEQ ID NO:273, and where | | |
| | b is greater than or equal to a +14. | | |
| 830984 | Preferably excluded from the present invention are one or | | |
| | more polynucleotides comprising a nucleotide sequence | | |
| | described by the general formula of a-b, where a is any | | |
| | integer between 1 to 1339 of SEQ ID NO:274, b is an integer | | |
| | of 15 to 1353, where both a and b correspond to the positions | | |
| | of nucleotide residues shown in SEQ ID NO:274, and where | | |
| | b is greater than or equal to a +14. | | |
| 831015 | Preferably excluded from the present invention are one or | | |
| | more polynucleotides comprising a nucleotide sequence | | |
| | described by the general formula of a-b, where a is any | | |
| | integer between 1 to 2648 of SEQ ID NO:275, b is an integer | | |
| | of 15 to 2662, where both a and b correspond to the positions | | |
| | of nucleotide residues shown in SEQ ID NO:275, and where | | |
| | b is greater than or equal to a +14. | | |
| 831080 | Preferably excluded from the present invention are one or | | |
| | more polynucleotides comprising a nucleotide sequence | | |
| | described by the general formula of a-b, where a is any | | |
| | integer between 1 to 2540 of SEQ ID NO:276, b is an integer | | |
| | of 15 to 2554, where both a and b correspond to the positions | | |
| | of nucleotide residues shown in SEQ ID NO:276, and where | | |
| | b is greater than or equal to a +14. | | |
| 831101 | Preferably excluded from the present invention are one or | T51286, T51410, T39928, T76990, T77156, T77499, R33812, R33813, | |
| | more polynucleotides comprising a nucleotide sequence | R38383, H21687, H21714, H21898, H21919, H25832, H26197, H26795, | |
| | described by the general formula of a-b, where a is any | H28008, H28649, H28869, H44418, H45258, H45325, H92329,1195779, | |
| | integer between 1 to 1792 of SEQ ID NO:277, b is an integer | AA043477, AA043478, AA054267, AA054080, AA257073, AA257167, | |
| | of 15 to 1806, where both a and b correspond to the positions | AA458482, AA459283, AA459512, AA425918, AA428787, AA287938, | |
| | of nucleotide residues shown in SEQ ID NO:277, and where | AA288002, AA505764, AA558609, AA743768, AA805217, AA894751, | |
| | b is greater than or equal to a +14. | AA954931, AA976613, A1056442, A1074512, F19600, C00516, C17221, | |
| | | C19044 | |
| 831146 | Preferably excluded from the present invention are one or | | |
| | more polynucleotides comprising a nucleotide sequence | | |
| | described by the general formula of a-b, where a is any | | |
| | integer between 1 to 2494 of SEQ ID NO:278, b is an integer | | |
| | of 15 to 2508, where both a and b correspond to the positions | | |
| | of nucleotide residues shown in SEQ ID NO:278, and where | | |
| | b is greater than or equal to a +14. | | |
| 831215 | Preferably excluded from the present invention are one or | | |
| | more polynucleotides comprising a nucleotide sequence | | |
| | described by the general formula of a-b, where a is any | | |
| | integer between 1 to 2398 of SEQ ID NO:279, b is an integer | | |
| | of 15 to 2412, where both a and b correspond to the positions | | |
| | of nucleotide residues shown in SEQ ID NO:279, and where | | |
| | b is greater than or equal to a +14. | | |
| 831231 | Preferably excluded from the present invention are one or | | |
| | more polynucleotides comprising a nucleotide sequence | | |
| | described by the general formula of a-b, where a is any | | |
| | integer between 1 to 3558 of SEQ ID NO:280, b is an integer | | |
| | of 15 to 3572, where both a and b correspond to the positions | | |
| | of nucleotide residues shown in SEQ ID NO:280, and where | | |
| | b is greater than or equal to a +14. | | |
| 831242 | Preferably excluded from the present invention are one or | R24850, R44553, R44553, N28609 | |
| | more polynucleotides comprising a nucleotide sequence | | |
| | described by the general formula of a-b, where a is any | | |
| | integer between 1 to 2347 of SEQ ID NO:281, b is an integer | | |
| | of 15 to 2361, where both a and b correspond to the positions | | |
| | of nucleotide residues shown in SEQ ID NO:281, and where | | |
| | b is greater than or equal to a +14. | | |
| 831267 | Preferably excluded from the present invention are one or | | |
| | more polynucleotides comprising a nucleotide sequence | | |
| | described by the general formula of a-b, where a is any | | |
| | integer between 1 to 1573 of SEQ ID NO:282, b is an integer | | |
| | of 15 to 1587, where both a and b correspond to the positions | | |
| | of nucleotide residues shown in SEQ ID NO:282, and where | | |
| | b is greater than or equal to a +14. | | |
| 831272 | Preferably excluded from the present invention are one or | | |
| | more polynucleotides comprising a nucleotide sequence | | |
| | described by the general formula of a-b, where a is any | | |
| | integer between 1 to 1959 of SEQ ID NO:283, b is an integer | | |
| | of 15 to 1973, where both a and b correspond to the positions | | |
| | of nucleotide residues shown in SEQ ID NO:283, and where | | |
| | b is greater than or equal to a +14. | | |
| 831291 | Preferably excluded from the present invention are one or | | |
| | more polynucleotides comprising a nucleotide sequence | | |
| | described by the general formula of a-b, where a is any | | |
| | integer between 1 to 1048 of SEQ ID NO:284, b is an integer | | |
| | of 15 to 1062, where both a and b correspond to the positions | | |
| | of nucleotide residues shown in SEQ ID NO:284, and where | | |
| | b is greater than or equal to a +14. | | |
| 831382 | Preferably excluded from the present invention are one or | | |
| | more polynucleotides comprising a nucleotide sequence | | |
| | described by the general formula of a-b, where a is any | | |
| | integer between 1 to 1405 of SEQ ID NO:285, b is an integer | | |
| | of 15 to 1419, where both a and b correspond to the positions | | |
| | of nucleotide residues shown in SEQ ID NO:285, and where | | |
| | b is greater than or equal to a +14. | | |
| 831624 | Preferably excluded from the present invention are one or | | |
| | more polynucleotides comprising a nucleotide sequence | | |
| | described by the general formula of a-b, where a is any | | |
| | integer between 1 to 1944 of SEQ ID NO:286, b is an integer | | |
| | of 15 to 1958, where both a and b correspond to the positions | | |
| | of nucleotide residues shown in SEQ ID NO:286, and where | | |
| | b is greater than or equal to a +14. | | |
| 831640 | Preferably excluded from the present invention are one or | | |
| | more polynucleotides comprising a nucleotide sequence | | |
| | described by the general formula of a-b, where a is any | | |
| | integer between 1 to 1216 of SEQ ID NO:287, b is an integer | | |
| | of 15 to 1230, where both a and b correspond to the positions | | |
| | of nucleotide residues shown in SEQ ID NO:287, and where | | |
| | b is greater than or equal to a +14. | | |
| 831688 | Preferably excluded from the present invention are one or | T50037, R16008, R28438, R35855, R70096, H12528, H21713, H27583, | |
| | more polynucleotides comprising a nucleotide sequence | R92877, N31160, N64728, N95336, W04892, W24359, W39124, W56834, | |
| | described by the general formula of a-b, where a is any | W61228, W76089, AA000992, AA054070, AA057867, AA128735, | |
| | integer between 1 to 1623 of SEQ ID NO:288, b is an integer | AA157619, AA157633, AA186509 | |
| | of 15 to 1637, where both a and b correspond to the positions | | |
| | of nucleotide residues shown in SEQ ID NO:288, and where | | |
| | b is greater than or equal to a +14. | | |
| 831690 | Preferably excluded from the present invention are one or | | |
| | more polynucleotides comprising a nucleotide sequence | | |
| | described by the general formula of a-b, where a is any | | |
| | integer between 1 to 3294 of SEQ ID NO:289, b is an integer | | |
| | of 15 to 3308, where both a and b correspond to the positions | | |
| | of nucleotide residues shown in SEQ ID NO:289, and where | | |
| | b is greater than or equal to a +14. | | |
| 831718 | Preferably excluded from the present invention are one or | | |
| | more polynucleotides comprising a nucleotide sequence | | |
| | described by the general formula of a-b, where a is any | | |
| | integer between 1 to 2225 of SEQ ID NO:290, b is an integer | | |
| | of 15 to 2239, where both a and b correspond to the positions | | |
| | of nucleotide residues shown in SEQ ID NO:290, and where | | |
| | b is greater than or equal to a +14. | | |
| 831832 | Preferably excluded from the present invention are one or | | |
| | more polynucleotides comprising a nucleotide sequence | | |
| | described by the general formula of a-b, where a is any | | |
| | integer between 1 to 1502 of SEQ ID NO:291, b is an integer | | |
| | of 15 to 1516, where both a and b correspond to the positions | | |
| | of nucleotide residues shown in SEQ ID NO:291, and where | | |
| | b is greater than or equal to a +14. | | |
| 831907 | Preferably excluded from the present invention are one or | T57273, R50749, H87724, AA236748, AA252480, AA252512, AA279648, | |
| | more polynucleotides comprising a nucleotide sequence | AA279856, AA512986, AA593101, AA742353, AA806266, AA830807, | |
| | described by the general formula of a-b, where a is any | AA838419, AA878541, AI089406 | |
| | integer between 1 to 2195 of SEQ ID NO:292, b is an integer | | |
| | of 15 to 2209, where both a and b correspond to the positions | | |
| | of nucleotide residues shown in SEQ ID NO:292, and where | | |
| | b is greater than or equal to a +14. | | |
| 831938 | Preferably excluded from the present invention are one or | | |
| | more polynucleotides comprising a nucleotide sequence | | |
| | described by the general formula of a-b, where a is any | | |
| | integer between 1 to 2057 of SEQ ID NO:293, b is an integer | | |
| | of 15 to 2071, where both a and b correspond to the positions | | |
| | of nucleotide residues shown in SEQ ID NO:293, and where | | |
| | b is greater than or equal to a +14. | | |
| 831954 | Preferably excluded from the present invention are one or | AA425659, AA427784, AA603348, AA740730, AA746891, AA767876, | |
| | more polynucleotides comprising a nucleotide sequence | AA768318, AA811192 | |
| | described by the general formula of a-b, where a is any | | |
| | integer between 1 to 1837 of SEQ ID NO:294, b is an integer | | |
| | of 15 to 1851, where both a and b correspond to the positions | | |
| | of nucleotide residues shown in SEQ ID NO:294, and where | | |
| | b is greater than or equal to a +14. | | |
| 832028 | Preferably excluded from the present invention are one or | | |
| | more polynucleotides comprising a nucleotide sequence | | |
| | described by the general formula of a-b, where a is any | | |
| | integer between 1 to 2984 of SEQ ID NO:295, b is an integer | | |
| | of 15 to 2998, where both a and b correspond to the positions | | |
| | of nucleotide residues shown in SEQ ID NO:295, and where | | |
| | b is greater than or equal to a +14. | | |
| 832043 | Preferably excluded from the present invention are one or | | |
| | more polynucleotides comprising a nucleotide sequence | | |
| | described by the general formula of a-b, where a is any | | |
| | integer between 1 to 1268 of SEQ ID NO:296, b is an integer | | |
| | of 15 to 1282, where both a and b correspond to the positions | | |
| | of nucleotide residues shown in SEQ ID NO:296, and where | | |
| | b is greater than or equal to a +14. | | |
| 832055 | Preferably excluded from the present invention are one or | T55840, T65026, T85378, T97664, R21752, R38028, R38114, R79190, | |
| | more polynucleotides comprising a nucleotide sequence | R79933, H27252, H28594, H38179, H52504, H61762, H64985, H64984, | |
| | described by the general formula of a-b, where a is any | H80983, H64985, W19298, W38161, W45410, W60075, W73887, AA010631, | |
| | integer between 1 to 664 of SEQ ID NO:297, b is an integer | AA035576, AA037696, AA037722, AA043216, AA043217, AA085492, | |
| | of 15 to 678, where both a and b correspond to the positions | AA088439, AA129575, AA129574, AA136658, AA136645, AA147228, | |
| | of nucleotide residues shown in SEQ ID NO:297, and where | AA148284, AA155661, AA157944, AA182640, AA190966, AA191414, | |
| | b is greater than or equal to a +14. | AA502832, AA524526, AA581093, AA603586, AA627686, AA662517, | |
| | | AA903050, AA962397, AA988297, W60032, C05782, C06111, C06123, | |
| | | C06365, C16377 | |
| 832124 | Preferably excluded from the present invention are one or | | |
| | more polynucleotides comprising a nucleotide sequence | | |
| | described by the general formula of a-b, where a is any | | |
| | integer between 1 to 1668 of SEQ ID NO:298, b is an integer | | |
| | of 15 to 1682, where both a and b correspond to the positions | | |
| | of nucleotide residues shown in SEQ ID NO:298, and where | | |
| | b is greater than or equal to a +14. | | |
| 832145 | Preferably excluded from the present invention are one or | | |
| | more polynucleotides comprising a nucleotide sequence | | |
| | described by the general formula of a-b, where a is any | | |
| | integer between 1 to 1580 of SEQ ID NO:299, b is an integer | | |
| | of 15 to 1594, where both a and b correspond to the positions | | |
| | of nucleotide residues shown in SEQ ID NO:299, and where | | |
| | b is greater than or equal to a +14. | | |
| 832254 | Preferably excluded from the present invention are one or | | |
| | more polynucleotides comprising a nucleotide sequence | | |
| | described by the general formula of a-b, where a is any | | |
| | integer between 1 to 1088 of SEQ ID NO:300, b is an integer | | |
| | of 15 to 1102, where both a and b correspond to the positions | | |
| | of nucleotide residues shown in SEQ ID NO:300, and where | | |
| | b is greater than or equal to a +14. | | |
| 832331 | Preferably excluded from the present invention are one or | | |
| | more polynucleotides comprising a nucleotide sequence | | |
| | described by the general formula of a-b, where a is any | | |
| | integer between 1 to 1075 of SEQ ID NO:301, b is an integer | | |
| | of 15 to 1089, where both a and b correspond to the positions | | |
| | of nucleotide residues shown in SEQ ID NO:301, and where | | |
| | b is greater than or equal to a +14. | | |
| 832360 | Preferably excluded from the present invention are one or | | |
| | more polynucleotides comprising a nucleotide sequence | | |
| | described by the general formula of a-b, where a is any | | |
| | integer between 1 to 1270 of SEQ ID NO:302, b is an integer | | |
| | of 15 to 1284, where both a and b correspond to the positions | | |
| | of nucleotide residues shown in SEQ ID NO:302, and where | | |
| | b is greater than or equal to a +14. | | |
| 832401 | Preferably excluded from the present invention are one or | 44301, R44301, R64177, R67317, H14557, H14558, H95697, H98099, | |
| | more polynucleotides comprising a nucleotide sequence | N76143, N80185, N91919, W03620, N89751, AA037403, AA043199, | |
| | described by the general formula of a-b, where a is any | AA115195, AA126984, AA287843, AA470665, AA713676, AA836329 | |
| | integer between 1 to 1095 of SEQ ID NO:303, b is an integer | | |
| | of 15 to 1109, where both a and b correspond to the positions | | |
| | of nucleotide residues shown in SEQ ID NO:303, and where | | |
| | b is greater than or equal to a +14. | | |
| 832403 | Preferably excluded from the present invention are one or | | |
| | more polynucleotides comprising a nucleotide sequence | | |
| | described by the general formula of a-b, where a is any | | |
| | integer between 1 to 574 of SEQ ID NO:304, b is an integer | | |
| | of 15 to 588, where both a and b correspond to the positions | | |
| | of nucleotide residues shown in SEQ ID NO:304, and where | | |
| | b is greater than or equal to a +14. | | |
| 832437 | Preferably excluded from the present invention are one or | | |
| | more polynucleotides comprising a nucleotide sequence | | |
| | described by the general formula of a-b, where a is any | | |
| | integer between 1 to 2005 of SEQ ID NO:305, b is an integer | | |
| | of 15 to 2019, where both a and b correspond to the positions | | |
| | of nucleotide residues shown in SEQ ID NO:305, and where | | |
| | b is greater than or equal to a +14. | | |
| 832492 | Preferably excluded from the present invention are one or | T39695, T93340, T94018, R37464, R48985, R81197, R81306, H09730, | |
| | more polynucleotides comprising a nucleotide sequence | H10488, H20077, H26355, H44167, H66653, H66652, H93441, H95634, | |
| | described by the general formula of a-b, where a is any | N21122, N31137, N36102, N39058, N39056, N41726, N44108, N48248, | |
| | integer between 1 to 3303 of SEQ ID NO:306, b is an integer | N62579, N69937, N73073, N73085, N75034, N75419, N80353, N98402, | |
| | of 15 to 3317, where both a and b correspond to the positions | N98614, W02296, W02312, W05712, W19510, W56426, W56310, W56311, | |
| of nucleotide residues shown in SEQ ID NO:306, and where | W56353, W56456, W60626, W60627, W94951, W95848, W96132, W96133, | | |
| b is greater than or equal to a+14. | N89916, AA031971, AA121379, AA121380, AA126802, AA129078, | | |
| | | AA129079, AA149578, AA259087, AA429410, AA429457, AA494332, | |
| | | AA602997, AA640565, AA731854, AA766500, AA769717, AA824556, | |
| | | AA824560, AA825584, AA825924, AA831365, AA857427, AA864804, | |
| | | AA877673, AA886291, AA888506, AA948257, AA954718, AA962473, | |
| | | AA962630, A1024764, C00923 | |
| 832598 | Preferably excluded from the present invention are one or | AA179189, AA179199, AA483506, AA551887, AA631189, AA806513, | |
| | more polynucleotides comprising a nucleotide sequence | AA837535 | |
| | described by the general formula of a-b, where a is any | | |
| | integer between 1 to 1269 of SEQ ID NO:307, b is an integer | | |
| | of 15 to 1283, where both a and b correspond to the positions | | |
| | b is greater than or equal to a +14. | | |
| 832605 | Preferably excluded from the present invention are one or | | |
| | more polynucleotides comprising a nucleotide sequence | | |
| | described by the general formula of a-b, where a is any | | |
| | integer between 1 to 4239 of SEQ ID NO:308, b is an integer | | |
| | of 15 to 4253, where both a and b correspond to the positions | | |
| | of nucleotide residues shown in SEQ ID NO:308, and where | | |
| | b is greater than or equal to a +14. | | |
| 834510 | Preferably excluded from the present invention are one or | AA036881, AA593656, AA749013, AA885587, AA953834, AI089760, | |
| | more polynucleotides comprising a nucleotide sequence | AI097541 | |
| | described by the general formula of a-b, where a is any | | |
| | integer between 1 to 2169 of SEQ ID NO:309, b is an integer | | |
| | of 15 to 2183, where both a and b correspond to the positions | | |
| | of nucleotide residues shown in SEQ ID NO:309, and where | | |
| | b is greater than or equal to a +14. | | |
| 835139 | Preferably excluded from the present invention are one or | R20799, R20912, R24679, R25179, R27752, R27753, R34881, R34983, | |
| more polynucleotides comprising a nucleotide sequence | R62621, R62672, R63644, R63645, R63707, R63754, R64165, R66336, | | |
| described by the general formula of a-b, where a is any | R66337, R67478, R76113, R79475, R79947, R80040, R80239, R80347, | | |
| integer between 1 to 3078 of SEQ ID NO:310, b is an integer | R81703, R81704, H00296, H00334, H03690, H06286, H06338, H15772, | | |
| of 15 to 3092, where both a and b correspond to the positions | H15773, H17464, H17570, H18473, H18581, H27396, H59355, H60010, | | |
| of nucleotide residues shown in SEQ ID NO:310, and where | H60011, H81738, H81739, H85151, H99488, N22740, N27287, N29648, | | |
| b is greater than or equal to a +14. | N40024, N44259, N56603, N66901, N67813, N73296, N78755, N79053, | | |
| | | W02360, W04650, W16638, W23994, W31574, AA026935, AA029759, | |
| | | AA030015, AA037453, AA037539, AA074776, AA075032, AA082470, | |
| | | AA125847, AA125848, AA133803, AA133804, AA171700, AA171624, | |
| | | AA460439, AA460440, AA229613, AA229704, AA490407, AA507836, | |
| | | AA555000, AA558375, AA581610, AA583156, AA614396, AA622078, | |
| | | AA622792, AA573324, AA575970, AA658946, AA662616, AA661494, | |
| | | AA742747, AA746025, AA747027, AA828231, AA911854, AA932862, | |
| | | AA932967, AA953903, AA969763, AA973490, AA974858, D82805, N56443, | |
| | | W03397, N87782, C17301, AA093368, AA093741 | |
| 835142 | Preferably excluded from the present invention are one or | | |
| | more polynucleotides comprising a nucleotide sequence | | |
| | described by the general formula of a-b, where a is any | | |
| | integer between 1 to 1282 of SEQ ID NO:311, b is an integer | | |
| | of 15 to 1296, where both a and b correspond to the positions | | |
| | of nucleotide residues shown in SEQ ID NO:311, and where | | |
| | b is greater than or equal to a +14. | | |
| 835271 | Preferably excluded from the present invention are one or | | |
| | more polynucleotides comprising a nucleotide sequence | | |
| | described by the general formula of a-b, where a is any | | |
| | integer between 1 to 1334 of SEQ ID NO:312, b is an integer | | |
| | of 15 to 1348, where both a and b correspond to the positions | | |
| | of nucleotide residues shown in SEQ ID NO:312, and where | | |
| | b is greater than or equal to a +14. | | |
| 835369 | Preferably excluded from the present invention are one or | | |
| | more polynucleotides comprising a nucleotide sequence | | |
| | described by the general formula of a-b, where a is any | | |
| | integer between 1 to 399 of SEQ ID NO:313, b is an integer | | |
| | of 15 to 413, where both a and b correspond to the positions | | |
| | of nucleotide residues shown in SEQ ID NO:313, and where | | |
| | b is greater than or equal to a +14. | | |
| 835430 | Preferably excluded from the present invention are one or | | |
| | more polynucleotides comprising a nucleotide sequence | | |
| | described by the general formula of a-b, where a is any | | |
| | integer between 1 to 1729 of SEQ ID NO:314, b is an integer | | |
| | of 15 to 1743, where both a and b correspond to the positions | | |
| | of nucleotide residues shown in SEQ ID NO:314, and where | | |
| | b is greater than or equal to a +14. | | |
| 835462 | Preferably excluded from the present invention are one or | | |
| | more polynucleotides comprising a nucleotide sequence | | |
| | described by the general formula of a-b, where a is any | | |
| | integer between 1 to 2030 of SEQ ID NO:315, b is an integer | | |
| | of 15 to 2044, where both a and b correspond to the positions | | |
| | of nucleotide residues shown in SEQ ID NO:315, and where | | |
| | b is greater than or equal to a +14. | | |
| 835539 | Preferably excluded from the present invention are one or | | |
| | | more polynucleotides comprising a nucleotide sequence | |
| | described by the general formula of a-b, where a is any | | |
| | integer between 1 to 1736 of SEQ ID NO:316, b is an integer | | |
| | of 15 to 1750, where both a and b correspond to the positions | | |
| | of nucleotide residues shown in SEQ ID NO:316, and where | | |
| | b is greater than or equal to a +14. | | |
| 835635 | Preferably excluded from the present invention are one or | R08753, R08753, R18799, H17931, H92797, N26921, N39878, AA069527, | |
| | more polynucleotides comprising a nucleotide sequence | AA069528, AA192726, AA527342, AA594555, AA744123, AA806333, | |
| | described by the general formula of a-b, where a is any | AA804403, AA811410, AA834380, AA911900, AA928410, AA976336, | |
| | integer between 1 to 2369 of SEQ ID NO:317, b is an integer | AI054047 | |
| | of 15 to 2383, where both a and b correspond to the positions | | |
| | of nucleotide residues shown in SEQ ID NO:317, and where | | |
| | b is greater than or equal to a +14. | | |
| 835815 | Preferably excluded from the present invention are one or | N34655, N51635, AA146803, AA635825, AA66 1648, AA744678, AA767727, | |
| | more polynucleotides comprising a nucleotide sequence | AA829571, AA878646, AA887947, AA962414 | |
| | described by the general formula of a-b, where a is any | | |
| | integer between 1 to 1047 of SEQ ID NO:318, b is an integer | | |
| | of 15 to 1061, where both a and b correspond to the positions | | |
| | of nucleotide residues shown in SEQ ID NO:318, and where | | |
| | b is greater than or equal to a +14. | | |
| 836161 | Preferably excluded from the present invention are one or | | |
| | more polynucleotides comprising a nucleotide sequence | | |
| | described by the general formula of a-b, where a is any | | |
| | integer between 1 to 2358 of SEQ ID NO:319, b is an integer | | |
| | of 15 to 2372, where both a and b correspond to the positions | | |
| | of nucleotide residues shown in SEQ ID NO:319, and where | | |
| | b is greater than or equal to a +14. | | |
| 836213 | Preferably excluded from the present invention are one or | | |
| | more polynucleotides comprising a nucleotide sequence | | |
| | described by the general formula of a-b, where a is any | | |
| | integer between 1 to 424 of SEQ ID NO:320, b is an integer | | |
| | of 15 to 438, where both a and b correspond to the positions | | |
| | of nucleotide residues shown in SEQ ID NO:320, and where | | |
| | b is greater than or equal to a +14. | | |
| 836371 | Preferably excluded from the present invention are one or | R51309, R51421, H92393, AA027066, AA029900, AA029988, AA121315, | |
| | more polynucleotides comprising a nucleotide sequence | AA121458, AA235804, AA235805, AA528009 | |
| | described by the general formula of a-b, where a is any | | |
| | integer between 1 to 2881 of SEQ ID NO:321, b is an integer | | |
| | of 15 to 2895, where both a and b correspond to the positions | | |
| | of nucleotide residues shown in SEQ ID NO:321, and where | | |
| | b is greater than or equal to a +14. | | |
| 836618 | Preferably excluded from the present invention are one or | | |
| | more polynucleotides comprising a nucleotide sequence | | |
| | described by the general formula of a-b, where a is any | | |
| | integer between 1 to 1161 of SEQ ID NO:322, b is an integer | | |
| | of 15 to H75, where both a and b correspond to the positions | | |
| | of nucleotide residues shown in SEQ ID NO:322, and where | | |
| | b is greater than or equal to a +14. | | |
| 836895 | Preferably excluded from the present invention are one or | T58153, H52653, H54656, H54657, H63551, H63595, H64019, H64073, | |
| | more polynucleotides comprising a nucleotide sequence | H91160, H91211, W40235, W45471, W86085, W86141, AA079853, | |
| | described by the general formula of a-b, where a is any | AA081692, AA082043, AA136424, AA166716, AA166806, AA232636, | |
| | integer between 1 to 3564 of SEQ ID NO:323, b is an integer | AA417255, AA278231, AA465183, AA482770, AA485036, AA485151, | |
| | of 15 to 3578, where both a and b correspond to the positions | AA543054, AA580845, AA582157, AA632202, AA580595, AA5 80712, | |
| | of nucleotide residues shown in SEQ ID NO:323, and where | AA714219, AA730742, AA731716, AA749004, AA761750, AA805016, | |
| | b is greater than or equal to a +14. | AA804371, AA810686, AA811573, AA912023, AA933881, AA953645, | |
| | | N84915, N84914, AA094644, AA219263 | |
| 837181 | Preferably excluded from the present invention are one or | | |
| | more polynucleotides comprising a nucleotide sequence | | |
| | described by the general formula of a-b, where a is any | | |
| | integer between 1 to 1701 of SEQ ID NO:324, b is an integer | | |
| | of 15 to 1715, where both a and b correspond to the positions | | |
| | of nucleotide residues shown in SEQ ID NO:324, and where | | |
| | b is greater than or equal to a +14. | | |
| 837238 | Preferably excluded from the present invention are one or | | |
| | more polynucleotides comprising a nucleotide sequence | | |
| | described by the general formula of a-b, where a is any | | |
| | integer between 1 to 1674 of SEQ ID NO:325, b is an integer | | |
| | of 15 to 1688, where both a and b correspond to the positions | | |
| | of nucleotide residues shown in SEQ ID NO:325, and where | | |
| | b is greater than or equal to a +14. | | |
| 837337 | Preferably excluded from the present invention are one or | | |
| | more polynucleotides comprising a nucleotide sequence | | |
| | described by the general formula of a-b, where a is any | | |
| | integer between 1 to 1618 of SEQ ID NO:326, b is an integer | | |
| | of 15 to 1632, where both a and b correspond to the positions | | |
| | of nucleotide residues shown in SEQ ID NO:326, and where | | |
| | b is greater than or equal to a +14. | | |
| 837530 | Preferably excluded from the present invention are one or | | |
| | more polynucleotides comprising a nucleotide sequence | | |
| | described by the general formula of a-b, where a is any | | |
| | integer between 1 to 2208 of SEQ ID NO:327, b is an integer | | |
| | of 15 to 2222, where both a and b correspond to the positions | | |
| | of nucleotide residues shown in SEQ ID NO:327, and where | | |
| | b is greater than or equal to a +14. | | |
| 837551 | Preferably excluded from the present invention are one or | R32620, H14146, H14152, H14176, H23134, H23135, H39661, H40959, | |
| | more polynucleotides comprising a nucleotide sequence | H43793, H89978, N95385, W74136, W79674, AA148653, AA148866, | |
| | described by the general formula of a-b, where a is any | AA176600, AA176831, AA176853, AA176960, AA195247, AA195432, | |
| | integer between 1 to 2153 of SEQ ID NO:328, b is an integer | AA243640, AA243759, AA258378, AA458602, AA463989, AA464129, | |
| | of 15 to 2167, where both a and b correspond to the positions | AA418426, AA514447, AA515681, F17274, AA745713, AA748828, | |
| | of nucleotide residues shown in SEQ ID NO:328, and where | AA768685, AA828210, AA865669, AA894376, AA906678, AA973976, | |
| | b is greater than or equal to a+14. | AA975159, AA977112, AA989448,AA996318, A1084115, C03377, | |
| | | AA291674, AA292183, AA399227 | |
| 837622 | Preferably excluded from the present invention are one or | | |
| | more polynucleotides comprising a nucleotide sequence | | |
| | described by the general formula of a-b, where a is any | | |
| | integer between 1 to 2359 of SEQ ID NO:329, b is an integer | | |
| | of 15 to 2373, where both a and b correspond to the positions | | |
| | of nucleotide residues shown in SEQ ID NO:329, and where | | |
| | b is greater than or equal to a +14. | | |
| 839908 | Preferably excluded from the present invention are one or | H00388 | |
| | more polynucleotides comprising a nucleotide sequence | | |
| | described by the general formula of a-b, where a is any | | |
| | integer between 1 to 1355 of SEQ ID NO:330, b is an integer | | |
| | of 15 to 1369, where both a and b correspond to the positions | | |
| | of nucleotide residues shown in SEQ ID NO:330, and where | | |
| | b is greater than or equal to a +14. | | |
| 839949 | Preferably excluded from the present invention are one or | | |
| | more polynucleotides comprising a nucleotide sequence | | |
| | described by the general formula of a-b, where a is any | | |
| | integer between 1 to 2850 of SEQ ID NO:331, his an integer | | |
| | of 15 to 2864, where both a and b correspond to the positions | | |
| | of nucleotide residues shown in SEQ ID NO:331, and where | | |
| | b is greater than or equal to a +14. | | |
| 840000 | Preferably excluded from the present invention are one or | N31178, AA127053, AA127054, AA158523, AA458650, AA429099, | |
| | more polynucleotides comprising a nucleotide sequence | AA533105, AA632061, AA804959, A1083728, AA641620, C15514, | |
| | described by the general formula of a-b, where a is any | AA482401, AA482546, D20434 | |
| | integer between 1 to 1971 of SEQ ID NO:332, b is an integer | | |
| | of 15 to 1985, where both a and b correspond to the positions | | |
| | of nucleotide residues shown in SEQ ID NO:332, and where | | |
| | | b is greater than or equal to a +14. | |
| 840095 | Preferably excluded from the present invention are one or | | |
| | more polynucleotides comprising a nucleotide sequence | | |
| | described by the general formula of a-b, where a is any | | |
| | integer between 1 to 3073 of SEQ ID NO:333, b is an integer | | |
| | of 15 to 3087, where both a and b correspond to the positions | | |
| | of nucleotide residues shown in SEQ ID NO:333, and where | | |
| | b is greater than or equal to a +14. | | |
| 840166 | Preferably excluded from the present invention are one or | | |
| | more polynucleotides comprising a nucleotide sequence | | |
| | described by the general formula of a-b, where a is any | | |
| | integer between 1 to 884 of SEQ ID NO:334, b is an integer | | |
| | of 15 to 898, where both a and b correspond to the positions | | |
| | of nucleotide residues shown in SEQ ID NO:334, and where | | |
| | b is greater than or equal to a +14. | | |
| 840249 | Preferably excluded from the present invention are one or | | |
| | more polynucleotides comprising a nucleotide sequence | | |
| | described by the general formula of a-b, where a is any | | |
| | integer between 1 to 930 of SEQ ID NO:335, b is an integer | | |
| | of 15 to 944, where both a and b correspond to the positions | | |
| | of nucleotide residues shown in SEQ ID NO:335, and where | | |
| | b is greater than or equal to a +14. | | |
| 840601 | Preferably excluded from the present invention are one or | | |
| | more polynucleotides comprising a nucleotide sequence | | |
| | described by the general formula of a-b, where a is any | | |
| | integer between 1 to 1593 of SEQ ID NO:336, b is an integer | | |
| | of 15 to 1607, where both a and b correspond to the positions | | |
| | of nucleotide residues shown in SEQ ID NO:336, and where | | |
| | b is greater than or equal to a +14. | | |
| 840613 | Preferably excluded from the present invention are one or | | |
| | more polynucleotides comprising a nucleotide sequence | | |
| | described by the general formula of a-b, where a is any | | |
| | integer between 1 to 3142 of SEQ ID NO:337, his an integer | | |
| | of 15 to 3156, where both a and b correspond to the positions | | |
| | of nucleotide residues shown in SEQ ID NO:337, and where | | |
| | b is greater than or equal to a +14. | | |
| 840699 | Preferably excluded from the present invention are one or | | |
| | more polynucleotides comprising a nucleotide sequence | | |
| | described by the general formula of a-b, where a is any | | |
| | integer between 1 to 1001 of SEQ ID NO:338, b is an integer | | |
| | of 15 to 1015, where both a and b correspond to the positions | | |
| | of nucleotide residues shown in SEQ ID NO:338, and where | | |
| | b is greater than or equal to a +14. | | |
| 840752 | Preferably excluded from the present invention are one or | | |
| | more polynucleotides comprising a nucleotide sequence | | |
| | described by the general formula of a-b, where a is any | | |
| | integer between 1 to 2074 of SEQ ID NO:339, b is an integer | | |
| | of 15 to 2088, where both a and b correspond to the positions | | |
| | of nucleotide residues shown in SEQ ID NO:339, and where | | |
| | b is greater than or equal to a +14. | | |
| 840755 | Preferably excluded from the present invention are one or | T57108, T57 176, T74743, T77315, T78379, R12958, R20783, R20892, | |
| | more polynucleotides comprising a nucleotide sequence | R21751, R21796, R40153, R45262, R77721, R78054, R78258, R78259, | |
| | described by the general formula of a-b, where a is any | H09712, H09767, H09853, H11767, H12018, H15956, H23057, H23153, | |
| | integer between 1 to 3110 of SEQ ID NO:340, his an integer | H23152, H24337, R99189, R99188, H50714, H50818, H80858, H80954, | |
| | of 15 to 3124, where both a and b correspond to the positions | H88936, H89165, N20086, N23817, N26014, N26287, N26603, N28761, | |
| | of nucleotide residues shown in SEQ ID NO:340, and where | N28817, N30771, N34519, N36179, N36646, N39466, N44167, N48755, | |
| | b is greater than or equal to a +14. | N66360, N94369, W73964, W79270, W84318, W96356, W96355, AA011090, | |
| | | AA011089, AA019540, AA018804, AA022750, AA022852, AA025733, | |
| | | AA025734, AA039842, AA045071, AA045453, AA055314, AA055315, | |
| | | AA083189, AA083190, AA084374, AA088698, AA088835, AA101934, | |
| | | AA101933, AA127099, AA127242, AA125914, AA126525, AA129220, | |
| | | AA151769, AA149728, AA149794, AA150111, AA156586, AA191756, | |
| | | AA221003, AA461267, AA226380, AA226492, AA278931, AA470412, | |
| | | AA505893, AA513664, AA515582, AA564504, AA594361, AA631351, | |
| | | AA580020, AA812186, AA830236, AA831237, AA858302, AA946744, | |
| | | W84345, C04338, C05340, C14190, AA214461, AA218996, AA403162, | |
| | | AA403230, AA421391, AA488608, AA599592, AA633970, AA703929, | |
| | | AA723222, AA775157, AA778160, AA779754, AA781965, AA853681, | |
| | | AA853682, AA905632, AA906459, AA907720, AI1031789, AI095882, T11252, | |
| | | T11253, D20806, Z39978, Z44490, T19212, T19356, T19426, F03570, F03732, | |
| | | R06913, F07503, F00825, F12904, F11081, F10946, F13350 | |
| 840844 | Preferably excluded from the present invention are one or | W79632 | |
| | more polynucleotides comprising a nucleotide sequence | | |
| | described by the general formula of a-b, where a is any | | |
| | integer between 1 to 231 of SEQ ID NO:341, b is an integer | | |
| | of 15 to 245, where both a and b correspond to the positions | | |
| | of nucleotide residues shown in SEQ ID NO:341, and where | | |
| | b is greater than or equal to a +14. | | |
| 841066 | Preferably excluded from the present invention are one or | | |
| | more polynucleotides comprising a nucleotide sequence | | |
| | described by the general formula of a-b, where a is any | | |
| | integer between 1 to 5654 of SEQ ID NO:342, b is an integer | | |
| | of 15 to 5668, where both a and b correspond to the positions | | |
| | of nucleotide residues shown in SEQ ID NO:342, and where | | |
| | b is greater than or equal to a +14. | | |
| 841306 | Preferably excluded from the present invention are one or | | |
| | more polynucleotides comprising a nucleotide sequence | | |
| | described by the general formula of a-b, where a is any | | |
| | integer between 1 to 800 of SEQ ID NO:343, b is an integer | | |
| | of 15 to 814, where both a and b correspond to the positions | | |
| | of nucleotide residues shown in SEQ ID NO:343, and where | | |
| | b is greater than or equal to a +14. | | |
| 841913 | Preferably excluded from the present invention are one or | | |
| | more polynucleotides comprising a nucleotide sequence | | |
| | described by the general formula of a-b, where a is any | | |
| | integer between 1 to 887 of SEQ ID NO:344, b is an integer | | |
| | of 15 to 901, where both a and b correspond to the positions | | |
| | of nucleotide residues shown in SEQ ID NO:344, and where | | |
| | b is greater than or equal to a +14. | | |
| 842025 | Preferably excluded from the present invention are one or | | |
| | more polynucleotides comprising a nucleotide sequence | | |
| | described by the general formula of a-b, where a is any | | |
| | integer between 1 to 2574 of SEQ ID NO:345, b is an integer | | |
| | of 15 to 2588, where both a and b correspond to the positions | | |
| | of nucleotide residues shown in SEQ ID NO:345, and where | | |
| | b is greater than or equal to a +14. | | |
| 842178 | Preferably excluded from the present invention are one or | | |
| | more polynucleotides comprising a nucleotide sequence | | |
| | described by the general formula of a-b, where a is any | | |
| | integer between 1 to 3756 of SEQ ID NO:346, b is an integer | | |
| | of 15 to 3770, where both a and b correspond to the positions | | |
| | of nucleotide residues shown in SEQ ID NO:346, and where | | |
| | b is greater than or equal to a +14. | | |
| 842438 | Preferably excluded from the present invention are one or | T95189, R21912, R22561, R77669, R77668, H02572, H02656, H02698, | |
| | more polynucleotides comprising a nucleotide sequence | N36870, N46443, N48944, N50609, N67667, N93157, N94539, W04700, | |
| | described by the general formula of a-b, where a is any | W19929, W20226, W30813, W31802, W32098, W38692, W38737, W38971, | |
| | integer between 1 to 2344 of SEQ ID NO:347, b is an integer | W42987, W44880, W45246, W46417, W46443, W55884, W55885, W60493, | |
| | of 15 to 2358, where both a and b correspond to the positions | W60779, N89986, N90587, AA031818, AA031819, AA043240, AA043569, | |
| | of nucleotide residues shown in SEQ ID NO:347, and where | AA057282, AA057064, AA058727, AA058543, AA069989, AA112313, | |
| | b is greater than or equal to a +14. | AA113069, AA135730, AA135774 | |
| 843289 | Preferably excluded from the present invention are one or | | |
| | more polynucleotides comprising a nucleotide sequence | | |
| | described by the general formula of a-b, where a is any | | |
| | integer between 1 to 2030 of SEQ ID NO:348, b is an integer | | |
| | of 15 to 2044, where both a and b correspond to the positions | | |
| | of nucleotide residues shown in SEQ ID NO:348, and where | | |
| | b is greater than or equal to a +14. | | |
| 843447 | Preferably excluded from the present invention are one or | | |
| | more polynucleotides comprising a nucleotide sequence | | |
| | described by the general formula of a-b, where a is any | | |
| | integer between 1 to 779 of SEQ ID NO:349, b is an integer | | |
| | of 15 to 793, where both a and b correspond to the positions | | |
| | of nucleotide residues shown in SEQ ID NO:349, and where | | |
| | b is greater than or equal to a +14. | | |
| 843743 | Preferably excluded from the present invention are one or | T59832, T63706, T64557, T65980, T82436, T92853, R09362, R64003, | |
| | more polynucleotides comprising a nucleotide sequence | R73660, R77168, R78819, R80999, H52262, H52359, H61317, H94744, | |
| | described by the general formula of a-b, where a is any | H94791, N93055, N99151, W24688, AA126780, AA128359, AA128522, | |
| | integer between 1 to 1044 of SEQ ID NO:350, b is an integer | AA160539, AA160634, AA173272, AA223663, AA223749 | |
| | of 15 to 1058, where both a and b correspond to the positions | | |
| | of nucleotide residues shown in SEQ ID NO:350, and where | | |
| | b is greater than or equal to a +14. | | |
| 843878 | Preferably excluded from the present invention are one or | | |
| | more polynucleotides comprising a nucleotide sequence | | |
| | described by the general formula of a-b, where a is any | | |
| | integer between 1 to 1334 of SEQ ID NO:351, b is an integer | | |
| | of 15 to 1348, where both a and b correspond to the positions | | |
| | of nucleotide residues shown in SEQ ID NO:351, and where | | |
| | b is greater than or equal to a +14. | | |
| 843964 | Preferably excluded from the present invention are one or | | |
| | more polynucleotides comprising a nucleotide sequence | | |
| | described by the general formula of a-b, where a is any | | |
| | integer between 1 to 3156 of SEQ ID NO:352, b is an integer | | |
| | of 15 to 3170, where both a and b correspond to the positions | | |
| | of nucleotide residues shown in SEQ ID NO:352, and where | | |
| | b is greater than or equal to a +14. | | |
| 844071 | Preferably excluded from the present invention are one or | | |
| | more polynucleotides comprising a nucleotide sequence | | |
| | described by the general formula of a-b, where a is any | | |
| | integer between 1 to 2999 of SEQ ID NO:353, b is an integer | | |
| | of 15 to 3013, where both a and b correspond to the positions | | |
| | of nucleotide residues shown in SEQ ID NO:353, and where | | |
| | b is greater than or equal to a +14. | | |
| 844444 | Preferably excluded from the present invention are one or | | |
| | more polynucleotides comprising a nucleotide sequence | | |
| | described by the general formula of a-b, where a is any | | |
| | integer between 1 to 1815 of SEQ ID NO:354, b is an integer | | |
| | of 15 to 1829, where both a and b correspond to the positions | | |
| | of nucleotide residues shown in SEQ ID NO:354, and where | | |
| | b is greater than or equal to a +14. | | |
| 844561 | Preferably excluded from the present invention are one or | | |
| | more polynucleotides comprising a nucleotide sequence | | |
| | described by the general formula of a-b, where a is any | | |
| | integer between 1 to 1628 of SEQ ID NO:355, b is an integer | | |
| | of 15 to 1642, where both a and b correspond to the positions | | |
| | of nucleotide residues shown in SEQ ID NO:355, and where | | |
| | b is greater than or equal to a +14. | | |
| 844953 | Preferably excluded from the present invention are one or | N51486, N53629, N59811, N72758, AA148559, AA165330, AA235159, | |
| | more polynucleotides comprising a nucleotide sequence | AA489244, AA504283, AA689472, AA689529, AA714017, AA731441, | |
| | described by the general formula of a-b, where a is any | C01997, N88816, A1025597 | |
| | integer between 1 to 2006 of SEQ ID NO:356, b is an integer | | |
| | of 15 to 2020, where both a and b correspond to the positions | | |
| | of nucleotide residues shown in SEQ ID NO:356, and where | | |
| | b is greater than or equal to a +14. | | |
| 844990 | Preferably excluded from the present invention are one or | | |
| | more polynucleotides comprising a nucleotide sequence | | |
| | described by the general formula of a-b, where a is any | | |
| | integer between 1 to 1203 of SEQ ID NO:357, b is an integer | | |
| | of 15 to 1217, where both a and b correspond to the positions | | |
| | of nucleotide residues shown in SEQ ID NO:357, and where | | |
| | b is greater than or equal to a +14. | | |
| 845379 | Preferably excluded from the present invention are one or | | |
| | more polynucleotides comprising a nucleotide sequence | | |
| | described by the general formula of a-b, where a is any | | |
| | integer between 1 to 1949 of SEQ ID NO:358, b is an integer | | |
| | of 15 to 1963, where both a and b correspond to the positions | | |
| | of nucleotide residues shown in SEQ ID NO:358, and where | | |
| | b is greater than or equal to a +14. | | |
| 845829 | Preferably excluded from the present invention are one or | T77613, H29246, H63829, AA164605 | |
| | more polynucleotides comprising a nucleotide sequence | | |
| | described by the general formula of a-b, where a is any | | |
| | integer between 1 to 1373 of SEQ ID NO:359, b is an integer | | |
| | of 15 to 1387, where both a and b correspond to the positions | | |
| | of nucleotide residues shown in SEQ ID NO:359, and where | | |
| | b is greater than or equal to a +14. | | |

[0063] Polynucleotide and Polypeptide Variants

[0064] The present invention is directed to variants of the polynucleotide sequence disclosed in SEQ I) NO:X or the complementary strand thereto, and/or the cDNA sequence contained in a cDNA clone contained in the deposit.

[0065] The present invention also encompasses variants of the lung and lung cancer polypeptide sequence disclosed in SEQ ID NO:Y, a polypeptide sequence encoded by the polynucleotide sequence in SEQ ID NO:X, and/or a polypeptide sequence encoded by the cDNA in the related cDNA clone contained in the deposit.

[0066] “Variant” refers to a polynucleotide or polypeptide differing from the polynucleotide or polypeptide of the present invention, but retaining essential properties thereof. Generally, variants are overall closely similar, and, in many regions, identical to the polynucleotide or polypeptide of the present invention.

[0067] The present invention is also directed to nucleic acid molecules which comprise, or alternatively consist of, a nucleotide sequence which is at least 80%, 85%, 90%, 95%, 96%, 97%, 98%, 99% or 100%, identical to, for example, the nucleotide coding sequence in SEQ ID NO:X or the complementary strand thereto, the nucleotide coding sequence of the related cDNA contained in a deposited library or the complementary strand thereto, a nucleotide sequence encoding the polypeptide of SEQ ID NO:Y, a nucleotide sequence encoding a polypeptide sequence encoded by the nucleotide sequence in SEQ ID NO:X, a nucleotide sequence encoding the polypeptide encoded by the cDNA in the related cDNA contained in a deposited library, and/or polynucleotide fragments of any of these nucleic acid molecules (e.g., those fragments described herein). Polypeptides encoded by these nucleic acid molecules are also encompassed by the invention. In another embodiment, the invention encompasses nucleic acid molecules which comprise or alternatively consist of, a polynucleotide which hybridizes under stringent hybridization conditions, or alternatively, under low stringency conditions, to the nucleotide coding sequence in SEQ ID NO:X, the nucleotide coding sequence of the related cDNA clone contained in a deposited library, a nucleotide sequence encoding the polypeptide of SEQ ID NO:Y, a nucleotide sequence encoding a polypeptide sequence encoded by the nucleotide sequence in SEQ ID NO:X, a nucleotide sequence encoding the polypeptide encoded by the cDNA in the related cDNA clone contained in a deposited library, and/or polynucleotide fragments of any of these nucleic acid molecules (e.g., those fragments described herein). Polynucleotides which hybridize to the complement of these nucleic acid molecules under stringent hybridization conditions or alternatively, under lower stringency conditions, are also encompassed by the invention, as are polypeptides encoded by these polynucleotides.

[0068] The present invention is also directed to polypeptides which comprise, or alternatively consist of, an amino acid sequence which is at least 80%, 85%, 90%, 95%, 96%, 97%, 98%, 99% or 100% identical to, for example, the polypeptide sequence shown in SEQ ID NO:Y, a polypeptide sequence encoded by the nucleotide sequence in SEQ ID NO:X, a polypeptide sequence encoded by the cDNA in the related cDNA clone contained in a deposited library, and/or polypeptide fragments of any of these polypeptides (e.g., those fragments described herein). Polynucleotides which hybridize to the complement of the nucleic acid molecules encoding these polypeptides under stringent hybridization conditions, or alternatively, under lower stringency conditions, are also encompassed by the invention, as are polypeptides encoded by these polynucleotides.

[0069] By a nucleic acid having a nucleotide sequence at least, for example, 95% “identical” to a reference nucleotide sequence of the present invention, it is intended that the nucleotide sequence of the nucleic acid is identical to the reference sequence except that the nucleotide sequence may include up to five point mutations per each 100 nucleotides of the reference nucleotide sequence encoding the polypeptide. In other words, to obtain a nucleic acid having a nucleotide sequence at least 95% identical to a reference nucleotide sequence, up to 5% of the nucleotides in the reference sequence may be deleted or substituted with another nucleotide, or a number of nucleotides up to 5% of the total nucleotides in the reference sequence may be inserted into the reference sequence. The query sequence may be, for example, an entire sequence referred to in Table 1, an ORF (open reading frame), or any fragment specified as described herein.

[0070] As a practical matter, whether any particular nucleic acid molecule or polypeptide is at least 80%, 85%, 90%, 95%, 96%, 97%, 98% or 99% identical to a nucleotide sequence of the present invention can be determined conventionally using known computer programs. A preferred method for determining the best overall match between a query sequence (a sequence of the present invention) and a subject sequence, also referred to as a global sequence alignment, can be determined using the FASTDB computer program based on the algorithm of Brutlag et al. (Comp. App. Biosci. 6:237-245 (1990)). In a sequence alignment the query and subject sequences are both DNA sequences. An RNA sequence can be compared by converting U's to T's. The result of said global sequence alignment is in percent identity. Preferred parameters used in a FASTDB alignment of DNA sequences to calculate percent identiy are: Matrix=Unitary, k-tuple=4, Mismatch Penalty=1, Joining Penalty=30, Randomization Group Length=0, Cutoff Score=1, Gap Penalty=5, Gap Size Penalty 0.05, Window Size=500 or the lenght of the subject nucleotide sequence, whichever is shorter.

[0071] If the subject sequence is shorter than the query sequence because of 5′ or 3′ deletions, not because of internal deletions, a manual correction must be made to the results. This is because the FASTDB program does not account for 5′ and 3′ truncations of the subject sequence when calculating percent identity. For subject sequences truncated at the 5′ or 3′ ends, relative to the query sequence, the percent identity is corrected by calculating the number of bases of the query sequence that are 5′ and 3′ of the subject sequence, which are not matched/aligned, as a percent of the total bases of the query sequence. Whether a nucleotide is matched/aligned is determined by results of the FASTDB sequence alignment. This percentage is then subtracted from the percent identity, calculated by the above FASTDB program using the specified parameters, to arrive at a final percent identity score. This corrected score is what is used for the purposes of the present invention. Only bases outside the 5′ and 3′ bases of the subject sequence, as displayed by the FASTDB alignment, which are not matched/aligned with the query sequence, are calculated for the purposes of manually adjusting the percent identity score.

[0072] For example, a 90 base subject sequence is aligned to a 100 base query sequence to determine percent identity. The deletions occur at the 5′ end of the subject sequence and therefore, the FASTDB alignment does not show a matched/alignment of the first 10 bases at 5′ end. The 10 unpaired bases represent 10% of the sequence (number of bases at the 5′ and 3′ ends not matched/total number of bases in the query sequence) so 10% is subtracted from the percent identity score calculated by the FASTDB program. If the remaining 90 bases were perfectly matched the final percent identity would be 90%. In another example, a 90 base subject sequence is compared with a 100 base query sequence. This time the deletions are internal deletions so that there are no bases on the 5′ or 3′ of the subject sequence which are not matched/aligned with the query. In this case the percent identity calculated by FASTDB is not manually corrected. Once again, only bases 5′ and 3′ of the subject sequence which are not matched/aligned with the query sequence are manually corrected for. No other manual corrections are to made for the purposes of the present invention.

[0073] By a polypeptide having an amino acid sequence at least, for example, 95% “identical” to a query amino acid sequence of the present invention, it is intended that the amino acid sequence of the subject polypeptide is identical to the query sequence except that the subject polypeptide sequence may include up to five amino acid alterations per each 100 amino acids of the query amino acid sequence. In other words, to obtain a polypeptide having an amino acid sequence at least 95% identical to a query amino acid sequence, up to 5% of the amino acid residues in the subject sequence may be inserted, deleted, (indels) or substituted with another amino acid. These alterations of the reference sequence may occur at the amino or carboxy terminal positions of the reference amino acid sequence or anywhere between those terminal positions, interspersed either individually among residues in the reference sequence or in one or more contiguous groups within the reference sequence.

[0074] As a practical matter, whether any particular polypeptide is at least 80%, 85%, 90%, 95%, 96%, 97%, 98% or 99% identical to, for instance, the amino acid sequence in SEQ ID NO:Y or a fragment thereof, the amino acid sequence encoded by the nucleotide sequence in SEQ ID NO:X or a fragment thereof, or the amino acid sequence encoded by the cDNA in the related cDNA clone contained in a deposited library, or a fragment thereof, can be determined conventionally using known computer programs. A preferred method for determing the best overall match between a query sequence (a sequence of the present invention) and a subject sequence, also referred to as a global sequence alignment, can be determined using the FASTDB computer program based on the algorithm of Brutlag et al. (Comp. App. Biosci.6:237-245(1990)). In a sequence alignment the query and subject sequences are either both nucleotide sequences or both amino acid sequences. The result of said global sequence alignment is in percent identity. Preferred parameters used in a FASTDB amino acid alignment are: Matrix=PAM 0, k-tuple=2, Mismatch Penalty=1, Joining Penalty=20, Randomization Group Length=0, Cutoff Score=1, Window Size=sequence length, Gap Penalty=5, Gap Size Penalty=0.05, Window Size=500 or the length of the subject amino acid sequence, whichever is shorter.

[0075] If the subject sequence is shorter than the query sequence due to N- or C-terminal deletions, not because of internal deletions, a manual correction must be made to the results. This is because the FASTDB program does not account for N- and C-terminal truncations of the subject sequence when calculating global percent identity. For subject sequences truncated at the N- and C-termini, relative to the query sequence, the percent identity is corrected by calculating the number of residues of the query sequence that are N- and C-terminal of the subject sequence, which are not matched/aligned with a corresponding subject residue, as a percent of the total bases of the query sequence. Whether a residue is matched/aligned is determined by results of the FASTDB sequence alignment. This percentage is then subtracted from the percent identity, calculated by the above FASTDB program using the specified parameters, to arrive at a final percent identity score. This final percent identity score is what is used for the purposes of the present invention. Only residues to the N- and C-termini of the subject sequence, which are not matched/aligned with the query sequence, are considered for the purposes of manually adjusting the percent identity score. That is, only query residue positions outside the farthest N- and C- terminal residues of the subject sequence.

[0076] For example, a 90 amino acid residue subject sequence is aligned with a 100 residue query sequence to determine percent identity. The deletion occurs at the N-terminus of the subject sequence and therefore, the FASTDB alignment does not show a matching/alignment of the first 10 residues at the N-terminus. The 10 unpaired residues represent 10% of the sequence (number of residues at the N- and C- termini not matched/total number of residues in the query sequence) so 10% is subtracted from the percent identity score calculated by the FASTDB program. If the remaining 90 residues were perfectly matched the final percent identity would be 90%. In another example, a 90 residue subject sequence is compared with a 100 residue query sequence. This time the deletions are internal deletions so there are no residues at the N- or C-termini of the subject sequence which are not matched/aligned with the query. In this case the percent identity calculated by FASTDB is not manually corrected. Once again, only residue positions outside the N- and C-terminal ends of the subject sequence, as displayed in the FASTDB alignment, which are not matched/aligned with the query sequence are manually corrected for. No other manual corrections are to made for the purposes of the present invention.

[0077] The variants may contain alterations in the coding regions, non-coding regions, or both. Especially preferred are polynucleotide variants containing alterations which produce silent substitutions, additions, or deletions, but do not alter the properties or activities of the encoded polypeptide. Nucleotide variants produced by silent substitutions due to the degeneracy of the genetic code are preferred. Moreover, variants in which less than 50, less than 40, less than 30, less than 20, less than 10, or 5-50, 5-25, 5-10, 1-5, or 1-2 amino acids are substituted, deleted, or added in any combination are also preferred. Polynucleotide variants can be produced for a variety of reasons, e.g., to optimize codon expression for a particular host (change codons in the human MRNA to those preferred by a bacterial host such as E. coli).

[0078] Naturally occurring variants are called “allelic variants,” and refer to one of several alternate forms of a gene occupying a given locus on a chromosome of an organism. (Genes II, Lewin, B., ed., John Wiley & Sons, New York (1985).) These allelic variants can vary at either the polynucleotide and/or polypeptide level and are included in the present invention. Alternatively, non-naturally occurring variants may be produced by mutagenesis techniques or by direct synthesis.

[0079] Using known methods of protein engineering and recombinant DNA technology, variants may be generated to improve or alter the characteristics of the polypeptides of the present invention. For instance, as discussed herein, one or more amino acids can be deleted from the N-terminus or C-terminus of the polypeptide of the present invention without substantial loss of biological function. The authors of Ron et al., J. Biol. Chem. 268: 2984-2988 (1993), reported variant KGF proteins having heparin binding activity even after deleting 3, 8, or 27 amino-terminal amino acid residues. Similarly, Interferon gamma exhibited up to ten times higher activity after deleting 8-10 amino acid residues from the carboxy terminus of this protein. (Dobeli et al., J. Biotechnology 7:199-216 (1988).)

[0080] Moreover, ample evidence demonstrates that variants often retain a biological activity similar to that of the naturally occurring protein. For example, Gayle and coworkers (J. Biol. Chem 268:22105-22111 (1993)) conducted extensive mutational analysis of human cytokine IL-1a. They used random mutagenesis to generate over 3,500 individual IL-1a mutants that averaged 2.5 amino acid changes per variant over the entire length of the molecule. Multiple mutations were examined at every possible amino acid position. The investigators found that “[m]ost of the molecule could be altered with little effect on either [binding or biological activity].” (See, Abstract.) In fact, only 23 unique amino acid sequences, out of more than 3,500 nucleotide sequences examined, produced a protein that significantly differed in activity from wild-type.

[0081] Furthermore, as discussed herein, even if deleting one or more amino acids from the N-terminus or C-terminus of a polypeptide results in modification or loss of one or more biological functions, other biological activities may still be retained. For example, the ability of a deletion variant to induce and/or to bind antibodies which recognize the secreted form will likely be retained when less than the majority of the residues of the secreted form are removed from the N-terminus or C-terminus. Whether a particular polypeptide lacking N- or C-terminal residues of a protein retains such immunogenic activities can readily be determined by routine methods described herein and otherwise known in the art.

[0082] Thus, the invention further includes polypeptide variants which show a functional activity (e.g., biological activity) of the polypeptide of the invention of which they are a variant. Such variants include deletions, insertions, inversions, repeats, and substitutions selected according to general rules known in the art so as have little effect on activity.

[0083] The present application is directed to nucleic acid molecules at least 80%, 85%, 90%, 95%, 96%, 97%, 98%, 99% or 100% identical to the nucleic acid sequences disclosed herein or fragments thereof, (e.g., including but not limited to fragments encoding a polypeptide having the amino acid sequence of an N and/or C terminal deletion), irrespective of whether they encode a polypeptide having functional activity. This is because even where a particular nucleic acid molecule does not encode a polypeptide having functional activity, one of skill in the art would still know how to use the nucleic acid molecule, for instance, as a hybridization probe or a polymerase chain reaction (PCR) primer. Uses of the nucleic acid molecules of the present invention that do not encode a polypeptide having functional activity include, inter alia, (1) isolating a gene or allelic or splice variants thereof in a cDNA library; (2) in situ hybridization (e.g., “FISH”) to metaphase chromosomal spreads to provide precise chromosomal location of the gene, as described in Verma et al., Human Chromosomes: A Manual of Basic Techniques, Pergamon Press, New York (1988); and (3) Northern Blot analysis for detecting MRNA expression in specific tissues.

[0084] Preferred, however, are nucleic acid molecules having sequences at least 80%, 85%, 90%, 95%, 96%, 97%, 98%, 99% or 100% identical to the nucleic acid sequences disclosed herein, which do, in fact, encode a polypeptide having a functional activity of a polypeptide of the invention.

[0085] Of course, due to the degeneracy of the genetic code, one of ordinary skill in the art will immediately recognize that a large number of the nucleic acid molecules having a sequence at least 80%, 85%, 90%, 95%, 96%, 97%, 98%, 99%, or 100% identical to, for example, the nucleic acid sequence of the cDNA in the related cDNA clone contained in a deposited library, the nucleic acid sequence referred to in Table 1 (SEQ ID NO:X), or fragments thereof, will encode polypeptides “having functional activity.” In fact, since degenerate variants of any of these nucleotide sequences all encode the same polypeptide, in many instances, this will be clear to the skilled artisan even without performing the above described comparison assay. It will be further recognized in the art that, for such nucleic acid molecules that are not degenerate variants, a reasonable number will also encode a polypeptide having functional activity. This is because the skilled artisan is fully aware of amino acid substitutions that are either less likely or not likely to significantly effect protein function (e.g., replacing one aliphatic amino acid with a second aliphatic amino acid), as further described below.

[0086] For example, guidance concerning how to make phenotypically silent amino acid substitutions is provided in Bowie et al., “Deciphering the Message in Protein Sequences: Tolerance to Amino Acid Substitutions,” Science 247:1306-1310 (1990), wherein the authors indicate that there are two main strategies for studying the tolerance of an amino acid sequence to change.

[0087] The first strategy exploits the tolerance of amino acid substitutions by natural selection during the process of evolution. By comparing amino acid sequences in different species, conserved amino acids can be identified. These conserved amino acids are likely important for protein function. In contrast, the amino acid positions where substitutions have been tolerated by natural selection indicates that these positions are not critical for protein function. Thus, positions tolerating amino acid substitution could be modified while still maintaining biological activity of the protein.

[0088] The second strategy uses genetic engineering to introduce amino acid changes at specific positions of a cloned gene to identify regions critical for protein function. For example, site directed mutagenesis or alanine-scanning mutagenesis (introduction of single alanine mutations at every residue in the molecule) can be used. (Cunningham and Wells, Science 244:1081-1085 (1989).) The resulting mutant molecules can then be tested for biological activity.

[0089] As the authors state, these two strategies have revealed that proteins are surprisingly tolerant of amino acid substitutions. The authors further indicate which amino acid changes are likely to be permissive at certain amino acid positions in the protein. For example, most buried (within the tertiary structure of the protein) amino acid residues require nonpolar side chains, whereas few features of surface side chains are generally conserved. Moreover, tolerated conservative amino acid substitutions involve replacement of the aliphatic or hydrophobic amino acids Ala, Val, Leu and Ile; replacement of the hydroxyl residues Ser and Thr; replacement of the acidic residues Asp and Glu; replacement of the amide residues Asn and Gln, replacement of the basic residues Lys, Arg, and His; replacement of the aromatic residues Phe, Tyr, and Trp, and replacement of the small-sized amino acids Ala, Ser, Thr, Met, and Gly. Besides conservative amino acid substitution, variants of the present invention include (i) substitutions with one or more of the non-conserved amino acid residues, where the substituted amino acid residues may or may not be one encoded by the genetic code, or (ii) substitution with one or more of amino acid residues having a substituent group, or (iii) fusion of the mature polypeptide with another compound, such as a compound to increase the stability and/or solubility of the polypeptide (for example, polyethylene glycol), or (iv) fusion of the polypeptide with additional amino acids, such as, for example, an IgG Fc fusion region peptide, or leader or secretory sequence, or a sequence facilitating purification. Such variant polypeptides are deemed to be within the scope of those skilled in the art from the teachings herein.

[0090] For example, polypeptide variants containing amino acid substitutions of charged amino acids with other charged or neutral amino acids may produce proteins with improved characteristics, such as less aggregation. Aggregation of pharmaceutical formulations both reduces activity and increases clearance due to the aggregate's immunogenic activity. (Pinckard et al., Clin. Exp. Immunol. 2:331-340 (1967); Robbins et al., Diabetes 36: 838-845 (1987); Cleland et al., Crit. Rev. Therapeutic Drug Carrier Systems 10:307-377 (1993).)

[0091] A further embodiment of the invention relates to a polypeptide which comprises the amino acid sequence of a polypeptide having an amino acid sequence which contains at least one amino acid substitution, but not more than 50 amino acid substitutions, even more preferably, not more than 40 amino acid substitutions, still more preferably, not more than 30 amino acid substitutions, and still even more preferably, not more than 20 amino acid substitutions. Of course it is highly preferable for a polypeptide to have an amino acid sequence which comprises the amino acid sequence of a polypeptide of SEQ ID NO:Y, an amino acid sequence encoded by SEQ ID NO:X, and/or the amino acid sequence encoded by the cDNA in the related cDNA clone contained in a deposited library which contains, in order of ever-increasing preference, at least one, but not more than 10, 9, 8, 7, 6, 5, 4, 3, 2 or 1 amino acid substitutions. In specific embodiments, the number of additions, substitutions, and/or deletions in the amino acid sequence of SEQ ID NO:Y or fragments thereof (e.g., the mature form and/or other fragments described herein), an amino acid sequence encoded by SEQ ID NO:X or fragments thereof, and/or the amino acid sequence encoded by the cDNA in the related cDNA clone contained in a deposited library or fragments thereof, is 1-5, 5-10, 5-25, 5-50, 10-50 or 50-150, conservative amino acid substitutions are preferable.

[0092] Polynucleotide and Polypeptide Fragments

[0093] The present invention is also directed to polynucleotide fragments of the lung and lung cancer polynucleotides (nucleic acids) of the invention. In the present invention, a “polynucleotide fragment” refers, for example, to a polynucleotide having a nucleic acid sequence which: is a portion of the cDNA contained in a depostied cDNA clone; or is a portion of a polynucleotide sequence encoding the polypeptide encoded by the cDNA contained in a deposited cDNA clone; or is a portion of the polynucleotide sequence in SEQ ID NO:X or the complementary strand thereto; or is a polynucleotide sequence encoding a portion of the polypeptide of SEQ ID NO:Y; or is a polynucleotide sequence encoding a portion of a polypeptide encoded by SEQ ID NO:X or the complementary strand thereto. The nucleotide fragments of the invention are preferably at least about 15 nt, and more preferably at least about 20 nt, still more preferably at least about 30 nt, and even more preferably, at least about 40 nt, at least about 50 nt, at least about 75 nt, at least about 100 nt, at least about 125 nt or at least about 150 nt in length. A fragment “at least 20 nt in length,” for example, is intended to include 20 or more contiguous bases from, for example, the sequence contained in the cDNA in a related cDNA clone contained in a deposited library, the nucleotide sequence shown in SEQ ID NO:X or the complementary stand thereto. In this context “about” includes the particularly recited value or a value larger or smaller by several (5, 4, 3, 2, or 1) nucleotides. These nucleotide fragments have uses that include, but are not limited to, as diagnostic probes and primers as discussed herein. Of course, larger fragments (e.g., at least 150, 175, 200, 250, 500, 600, 1000, or 2000 nucleotides in length) are also encompassed by the invention.

[0094] Moreover, representative examples of polynucleotide fragments of the invention, include, for example, fragments comprising, or alternatively consisting of, a sequence from about nucleotide number 1-50, 51-100, 101-150, 151-200, 201-250, 251-300, 301-350, 351-400, 401-450, 451-500, 501-550, 551-600, 651-700,701-750, 751-800, 800-850, 851-900, 901-950, 951-1000, 1001-1050, 1051-1100, 1101-1150, 1151-1200, 1201-1250, 1251-1300, 1301-1350, 1351-1400, 1401-1450, 1451-1500, 1501-1550, 1551-1600, 1601-1650, 1651-1700, 1701-1750, 1751-1800, 1801-1850, 1851-1900, 1901-1950, 1951-2000, 2001-2050, 2051-2100, 2101-2150, 2151-2200, 2201-2250, 2251-2300, 2301-2350, 2351-2400, 2401-2450, 2451-2500, 2501-2550, 2551-2600, 2601-2650, 2651-2700, 2701-2750, 2751-2800, 2801-2850, 2851-2900, 2901-2950, 2951-3000, 3001-3050, 3051-3100, 3101-3150, 3151-3200, 3201-3250, 3251-3300, 3301-3350, 3351-3400, 3401-3450, 3451-3500, 3501-3550, and 3551 to the end of SEQ ID NO:X, or the complementary strand thereto. In this context “about” includes the particularly recited range or a range larger or smaller by several (5, 4, 3, 2, or 1) nucleotides, at either terminus or at both termini. Preferably, these fragments encode a polypeptide which has a functional activity (e.g., biological activity) of the polypeptide encoded by the polynucleotide of which the sequence is a portion. More preferably, these fragments can be used as probes or primers as discussed herein. Polynucleotides which hybridize to one or more of these nucleic acid molecules under stringent hybridization conditions or alternatively, under lower stringency conditions, are also encompassed by the invention, as are polypeptides encoded by these polynucleotides or fragments.

[0095] Moreover, representative examples of polynucleotide fragments of the invention, include, for example, fragments comprising, or alternatively consisting of, a sequence from about nucleotide number 1-50, 51-100, 101-150, 151-200, 201-250, 251-300, 301-350, 351-400, 401-450, 451-500, 501-550, 551-600, 651-700,701-750, 751-800, 800-850, 851-900, 901-950, 951-1000, 1001-1050, 1051-1100, 1101-1150, 1151-1200, 1201-1250, 1251-1300, 1301-1350, 1351-1400, 1401-1450, 1451-1500, 1501-1550, 1551-1600, 1601-1650, 1651-1700, 1701-1750, 1751-1800, 1801-1850, 1851-1900, 1901-1950, 1951-2000, 2001-2050, 2051-2100, 2101-2150, 2151-2200, 2201-2250, 2251-2300, 2301-2350, 2351-2400, 2401-2450, 2451-2500, 2501-2550, 2551-2600, 2601-2650, 2651-2700, 2701-2750, 2751-2800, 2801-2850, 2851-2900, 2901-2950, 2951-3000, 3001-3050, 3051-3100, 3101-3150, 3151-3200, 3201-3250, 3251-3300, 3301-3350, 3351-3400, 3401-3450, 3451-3500, 3501-3550, and 3551 to the end of the cDNA nucleotide sequence contained in the deposited cDNA clone, or the complementary strand thereto. In this context “about” includes the particularly recited range, or a range larger or smaller by several (5, 4, 3, 2, or 1) nucleotides, at either terminus or at both termini. Preferably, these fragments encode a polypeptide which has a functional activity (e.g., biological activity) of the polypeptide encoded by the cDNA nucleotide sequence contained in the deposited cDNA clone. More preferably, these fragments can be used as probes or primers as discussed herein. Polynucleotides which hybridize to one or more of these fragments under stringent hybridization conditions or alternatively, under lower stringency conditions, are also encompassed by the invention, as are polypeptides encoded by these polynucleotides or fragments.

[0096] In the present invention, a “polypeptide fragment” refers to an amino acid sequence which is a portion of that contained in SEQ ID NO:Y, a portion of an amino acid sequence encoded by the polynucleotide sequence of SEQ ID NO:X, and/or encoded by the cDNA contained in the related cDNA clone contained in a deposited library. Protein (polypeptide) fragments may be “free-standing,” or comprised within a larger polypeptide of which the fragment forms a part or region, most preferably as a single continuous region. Representative examples of polypeptide fragments of the invention, include, for example, fragments comprising, or alternatively consisting of, an amino acid sequence from about amino acid number 1-20, 21-40, 41-60, 61-80, 81-100, 102-120, 121-140, 141-160, 161-180, 181-200, 201-220, 221-240, 241-260, 261-280, 281-300, 301-320, 321-340, 341-360, 361-380, 381-400, 401-420, 421-440, 441-460, 461-480, 481-500, 501-520, 521-540, 541-560, 561-580, 581-600, 601-620, 621-640, 641-660, 661-680, 681-700, 701-720, 721-740, 741-760, 761-780, 781-800, 801-820, 821-840, 841-860, 861-880, 881-900, 901-920, 921-940, 941-960, 961-980, 981-1000, 1001-1020, 1021-1040, 1041-1060, 1061-1080, 1081-1100, 1101-1120, 1121-1140, 1141-1160, 1161-1180, and 1181 to the end of SEQ ID NO:Y. Moreover, polypeptide fragments of the invention may be at least about 10, 15,20,25,30,35,40,45,50,55,60,65,70,75,80,85,90, 100, 110, 120, 130, 140,or 150 amino acids in length. In this context “about” includes the particularly recited ranges or values, or ranges or values larger or smaller by several (5, 4, 3, 2, or 1) amino acids, at either terminus or at both termini. Polynucleotides encoding these polypeptide fragments are also encompassed by the invention.

[0097] Even if deletion of one or more amino acids from the N-terminus of a protein results in modification of loss of one or more biological functions of the protein, other functional activities (e.g., biological activities, ability to multimerize, ability to bind a ligand) may still be retained. For example, the ability of shortened muteins to induce and/or bind to antibodies which recognize the complete or mature forms of the polypeptides generally will be retained when less than the majority of the residues of the complete or mature polypeptide are removed from the N-terminus. Whether a particular polypeptide lacking N-terminal residues of a complete polypeptide retains such immunologic activities can readily be determined by routine methods described herein and otherwise known in the art. It is not unlikely that a mutein with a large number of deleted N-terminal amino acid residues may retain some biological or immunogenic activities. In fact, peptides composed of as few as six amino acid residues may often evoke an immune response.

[0098] Accordingly, polypeptide fragments of the invention include the secreted protein as well as the mature form. Further preferred polypeptide fragments include the secreted protein or the mature form having a continuous series of deleted residues from the amino or the carboxy terminus, or both. For example, any number of amino acids, ranging from 1-60, can be deleted from the amino terminus of either the secreted polypeptide or the mature form. Similarly, any number of amino acids, ranging from 1-30, can be deleted from the carboxy terminus of the secreted protein or mature form. Furthermore, any combination of the above amino and carboxy terminus deletions are preferred. Similarly, polynucleotides encoding these polypeptide fragments are also preferred.

[0099] The present invention further provides polypeptides having one or more residues deleted from the amino terminus of the amino acid sequence of a polypeptide disclosed herein (e.g., a polypeptide of SEQ ID NO:Y, a polypeptide encoded by the polynucleotide sequence contained in SEQ ID NO:X, and/or a polypeptide encoded by the cDNA contained in the related cDNA clone contained in a deposited library). In particular, N-terminal deletions may be described by the general formula m-q, where q is a whole integer representing the total number of amino acid residues in a polypeptide of the invention (e.g., the polypeptide disclosed in SEQ ID NO:Y), and m is defined as any integer ranging from 2 to q−6. Polynucleotides encoding these polypeptides are also encompassed by the invention.

[0100] Also as mentioned above, even if deletion of one or more amino acids from the C-terminus of a protein results in modification of loss of one or more biological functions of the protein, other functional activities (e.g., biological activities, ability to multimerize, ability to bind a ligand) may still -be retained. For example the ability of the shortened mutein to induce and/or bind to antibodies which recognize the complete or mature forms of the polypeptide generally will be retained when less than the majority of the residues of the complete or mature polypeptide are removed from the C-terminus. Whether a particular polypeptide lacking C-terminal residues of a complete polypeptide retains such immunologic activities can readily be determined by routine methods described herein and otherwise known in the art. It is not unlikely that a mutein with a large number of deleted C-terminal amino acid residues may retain some biological or immunogenic activities. In fact, peptides composed of as few as six amino acid residues may often evoke an immune response.

[0101] Accordingly, the present invention further provides polypeptides having one or more residues from the carboxy terminus of the amino acid sequence of a polypeptide disclosed herein (e.g., a polypeptide of SEQ ID NO:Y, a polypeptide encoded by the polynucleotide sequence contained in SEQ ID NO:X, and/or a polypeptide encoded by the cDNA contained in deposited cDNA clone referenced in Table 1). In particular, C-terminal deletions may be described by the general formula 1-n, where n is any whole integer ranging from 6 to q-1, and where n corresponds to the position of an amino acid residue in a polypeptide of the invention. Polynucleotides encoding these polypeptides are also encompassed by the invention.

[0102] In addition, any of the above described N- or C-terminal deletions can be combined to produce a N- and C-terminal deleted polypeptide. The invention also provides polypeptides having one or more amino acids deleted from both the amino and the carboxyl termini, which may be described generally as having residues m-n of a polypeptide encoded by SEQ ID NO:X (e.g., including, but not limited to, the preferred polypeptide disclosed as SEQ ID NO:Y), and/or the cDNA in the related cDNA clone contained in a deposited library, where n and m are integers as described above. Polynucleotides encoding these polypeptides are also encompassed by the invention.

[0103] Any polypeptide sequence contained in the polypeptide of SEQ ID NO:Y, encoded by the polynucleotide sequences set forth as SEQ ID NO:X, or encoded by the cDNA in the related cDNA clone contained in a deposited library may be analyzed to determine certain preferred regions of the polypeptide. For example, the amino acid sequence of a polypeptide encoded by a polynucleotide sequence of SEQ ID NO:X, or the cDNA in a deposited cDNA clone may be analyzed using the default parameters of the DNASTAR computer algorithm (DNASTAR, Inc., 1228 S. Park St., Madison, Wis. 53715 USA; http://www.dnastar.com/).

[0104] Polypeptide regions that may be routinely obtained using the DNASTAR computer algorithm include, but are not limited to, Garnier-Robson alpha-regions, beta-regions, turn-regions, and coil-regions, Chou-Fasman alpha-regions, beta-regions, and turn-regions, Kyte-Doolittle hydrophilic regions and hydrophobic regions, Eisenberg alpha- and beta-amphipathic regions, Karplus-Schulz flexible regions, Emini surface-forming regions and Jameson-Wolf regions of high antigenic index. Among highly preferred polynucleotides of the invention in this regard are those that encode polypeptides comprising regions that combine several structural features, such as several (e.g., 1, 2, 3 or 4) of the features set out above.

[0105] Additionally, Kyte-Doolittle hydrophilic regions and hydrophobic regions, Emini surface-forming regions, and Jameson-Wolf regions of high antigenic index (i.e., containing four or more contiguous amino acids having an antigenic index of greater than or equal to 1.5, as identified using the default parameters of the Jameson-Wolf program) can routinely be used to determine polypeptide regions that exhibit a high degree of potential for antigenicity. Regions of high antigenicity are determined from data by DNASTAR analysis by choosing values which represent regions of the polypeptide which are likely to be exposed on the surface of the polypeptide in an environment in which antigen recognition may occur in the process of initiation of an immune response.

[0106] Preferred polypeptide fragments of the invention are fragments comprising, or alternatively consisting of, an amino acid sequence that displays a functional activity of the polypeptide sequence of which the amino acid sequence is a fragment.

[0107] By a polypeptide demonstrating a “functional activity” is meant, a polypeptide capable of displaying one or more known functional activities associated with a full-length (complete) protein of the invention. Such functional activities include, but are not limited to, biological activity, antigenicity [ability to bind (or compete with a polypeptide for binding) to an anti-polypeptide antibody], immunogenicity (ability to generate antibody which binds to a specific polypeptide of the invention), ability to form multimers with polypeptides of the invention, and ability to bind to a receptor or ligand for a polypeptide.

[0108] Other preferred polypeptide fragments are biologically active fragments. Biologically active fragments are those exhibiting activity similar, but not necessarily identical, to an activity of the polypeptide of the present invention. The biological activity of the fragments may include an improved desired activity, or a decreased undesirable activity.

[0109] In preferred embodiments, polypeptides of the invention comprise, or alternatively consist of, one, two, three, four, five or more of the antigenic fragments of the polypeptide of SEQ ID NO:Y, or portions thereof. Polynucleotides encoding these polypeptides are also encompassed by the invention.

TABLE 4

| Sequence/ | |
|---|---|
| Contig ID | Epitope |
| 507002 | Preferred epitopes include those comprising a sequence shown in SEQ ID NO. 444 as |
| | residues: Gln-15 to Gln-34, Ser-40 to Gly-52, Gly-80 to Met-85, Ser-95 to Lys-100, |
| | Gln-107 to Lys-113, Asp-131 to Glu-141, Gln-206 to Pro-228, Ser-235 to Met-240, Val- |
| | 242 to Lys-249, Ser-255 to Gly-262, Cys-309 to Thr-323. |
| 508935 | Preferred epitopes include those comprising a sequence shown in SEQ ID NO. 445 as |
| | residues: Arg-3 to Thr-8, Glu-32 to Glu-37, Ser-46 to Ala-54, Ala-110 to Gly-116, Gly- |
| | 234 to Glu-239, Lys-276 to His-282, Thr-342 to Pro-348, Lys-410 to Gln-415, Pro-428 |
| | to Lys-437, Arg-446 to Thr-452, Asp-527 to Leu-533, Pro-548 to Glu-556, Glu-563 to |
| | Tyr-568, Gly-579 to Val-586. |
| 518959 | Preferred epitopes include those comprising a sequence shown in SEQ ID NO. 446 as |
| | residues: Ser-51 to Gly-58, Thr-70 to Gly-76, Pro-105 to Trp-110. |
| 539756 | Preferred epitopes include those comprising a sequence shown in SEQ ID NO. 447 as |
| | residues: Pro-11 to Pro-17. |
| 540125 | Preferred epitopes include those comprising a sequence shown in SEQ ID NO. 448 as |
| | residues: Pro-9 to His-14, Asn-21 to His-27, Val-276 to Glu-285, Thr-308 to Asp-335. |
| 540275 | Preferred epitopes include those comprising a sequence shown in SEQ ID NO. 449 as |
| | residues: Ser-14 to Gly-20, Tyr-45 to Ser-55, Gly-91 to Ser-99, Thr-123 to Ser-128, Thr- |
| | 134 to Glu-142, Arg-189 to Lys-202, Glu-225 to Gly-230, Ser-237 to Ser-245, Lys-432 |
| | to Trp-439, Ile-471 to Asp-476, Glu-575 to Phe-581, Thr-602 to Ala-608. |
| 540331 | Preferred epitopes include those comprising a sequence shown in SEQ ID NO. 450 as |
| | residues: Ser-22 to Cys-34, Gln-47 to Ser-54, Glu-61 to Gly-67, Pro-69 to Trp-78. |
| 540955 | Preferred epitopes include those comprising a sequence shown in SEQ ID NO. 451 as |
| | residues: Met-43 to Ser-49, Leu-107 to Gly-114, Gly-130 to Ser-141. |
| 541251 | Preferred epitopes include those comprising a sequence shown in SEQ ID NO. 452 as |
| | residues: Gly-60 to Leu-66, Gln-139 to Gly-146, Leu-165 to Arg-177, Arg-192 to Trp- |
| | 199, Gln-248 to Thr-253, Leu-257 to Asn-270, Leu-344 to Pro-351, Ala-398 to Gly-409, |
| | Glu-466 to Arg-486. |
| 41978 | Preferred epitopes include those comprising a sequence shown in SEQ ID NO. 453 as |
| | residues: Gln-7 to Arg-12, Ser-64 to Lys-72, Ala-108 to Glu-113, Arg-127 to Gln-141. |
| 47680 | Preferred epitopes include those comprising a sequence shown in SEQ ID NO. 454 as |
| | residues: Asp-12 to Tyr-17, Asn-56 to Gly-65, Ala-70 to Thr-80, Ile-85 to Phe-94, Thr- |
| | 96 to Tyr-101, Ala-114 to Ser-120, Glu-126 to Arg-131, Thr-143 to Gly-148, Asp-192 to |
| | Tyr-198, Ile-212 to Tyr-219. |
| 547705 | Preferred epitopes include those comprising a sequence shown in SEQ ID NO. 455 as |
| | residues: Asn-1 to Val-8, Gln-26 to Ser-31, Asp-50 to Tyr-56, Arg-70 to Trp-75, Val-87 |
| | to Leu-93, Glu-106 to Asp-112, Pro-126 to Asp-135, Ser-203 to His-208, Gln-222 to |
| | Gly-236, Ser-244 to Trp-254. |
| 549819 | Preferred epitopes include those comprising a sequence shown in SEQ ID NO. 457 as |
| | residues: His-1 to His-11. |
| 549820 | Preferred epitopes include those comprising a sequence shown in SEQ ID NO. 458 as |
| | residues: Ser-27 to Glu-43, Leu-75 to Phe-83. |
| 551426 | Preferred epitopes include those comprising a sequence shown in SEQ ID NO. 460 as |
| | residues: Glu-1 to Ala-8, Gly-12 to Lys-37, Ser-91 to Arg-100. |
| 552182 | Preferred epitopes include those comprising a sequence shown in SEQ ID NO. 461 as |
| | residues: Glu-24 to Cys-29, Ser-58 to Val-63. |
| 552540 | Preferred epitopes include those comprising a sequence shown in SEQ ID NO. 462 as |
| | residues: Gly-2 to Pro-8, Pro-57 to Arg-65. |
| 553367 | Preferred epitopes include those comprising a sequence shown in SEQ ID NO. 463 as |
| | residues: Arg-2 to Arg-13, Ala-32 to Gly-44, Ala-52 to Gly-59, His-85 to Lys-97, Ala- |
| | 160 to Ser-166, Ser-188 to Ile-193, Asp-209 to Phe-232. |
| 554326 | Preferred epitopes include those comprising a sequence shown in SEQ ID NO. 464 as |
| | residues: Arg-1 to Pro-15, Ser-146 to Arg-155, Leu-168 to Asp-174, Lys-181 to Thr- |
| | 186. |
| 554657 | Preferred epitopes include those comprising a sequence shown in SEQ ID NO. 465 as |
| | residues: Asp-45 to Pro-56, Thr-86 to Ser-91, Pro-127 to Arg-133, Asp-201 to Gln-215. |
| 556156 | Preferred epitopes include those comprising a sequence shown in SEQ ID NO. 466 as |
| | residues: Asp-44 to Val-52, His-71 to Ile-77. |
| 557747 | Preferred epitopes include those comprising a sequence shown in SEQ ID NO. 467 as |
| | residues: Tyr-18 to Ile-39, Asp-42 to Ala-48, Pro-71 to Glu-76, Ser-109 to Glu-119, |
| | Glu-133 to Thr-142. |
| 558599 | Preferred epitopes include those comprising a sequence shown in SEQ ID NO. 468 as |
| | residues: Lys-5 to Ala-11, Pro-13 to Gly-22, Pro-68 to Gln-73, Gly-99 to Asn-108, Lys- |
| | 137 to His-149. |
| 573366 | Preferred epitopes include those comprising a sequence shown in SEQ ID NO. 470 as |
| | residues: Ser-2 to Ala-13. |
| 573986 | Preferred epitopes include those comprising a sequence shown in SEQ ID NO. 471 as |
| | residues: Pro-10 to Gly-18, Glu-25 to Thr-37. |
| 575435 | Preferred epitopes include those comprising a sequence shown in SEQ ID NO. 472 as |
| | residues: Gly-65 to Tyr-75, Asp-86 to Glu-91, Phe-120 to Gly-125, Leu-135 to Asn-148, |
| | Trp-256 to Leu-261, Ser-309 to Ser-314, Glu-346 to Thr-354, Met-361 to Asp-366. |
| 584435 | Preferred epitopes include those comprising a sequence shown in SEQ ID NO. 474 as |
| | residues: Gly-5 to Met-13, Tyr-137 to Thr-143, Gly-161 to Gly-168, Gln-221 to Ser- |
| | 226. |
| 585658 | Preferred epitopes include those comprising a sequence shown in SEQ ID NO. 476 as |
| | residues: Ser-16 to Leu-25, Ala-103 to Asp-108, Ser-128 to Ser-139. |
| 585693 | Preferred epitopes include those comprising a sequence shown in SEQ ID NO. 477 as |
| | residues: Gln-28 to Lys-34, Leu-148 to Leu-154, Val-205 to Thr-210. |
| 585701 | Preferred epitopes include those comprising a sequence shown in SEQ ID NO. 478 as |
| | residues: Ala-17 to Gln-24, Lys-70 to Glu-79, Leu-124 to Tyr-145, Val-161 to Ala-166, |
| | Gln-203 to Gly-212, Asp-232 to Gly-248, Thr-299 to Lys-307. |
| 586019 | Preferred epitopes include those comprising a sequence shown in SEQ ID NO. 479 as |
| | residues: Val-104 to Ala-123, Gly-173 to Glu-180, Arg-197 to Phe-204. |
| 587225 | Preferred epitopes include those comprising a sequence shown in SEQ ID NO. 480 as |
| | residues: Glu-58 to Pro-65, Gln-74 to Cys-81, Ile-111 to Gln-1 19, Glu-147 to Trp-152, |
| | Pro-162 to Gln-167, Phe-208 to Ala-215, Asp-222 to Thr-228, Phe-230 to Gly-235, Tyr- |
| | 250 to Pro-257, Lys-272 to Leu-278. |
| 587445 | Preferred epitopes include those comprising a sequence shown in SEQ ID NO. 481 as |
| | residues: Pro-50 to Arg-55, Leu-68 to Arg-73. |
| 587596 | Preferred epitopes include those comprising a sequence shown in SEQ ID NO. 483 as |
| | residues: Gln-29 to Pro-35, Asn-51 to Glu-57. |
| 588548 | Preferred epitopes include those comprising a sequence shown in SEQ ID NO. 484 as |
| | residues: Ile-88 to Phe-97, Lys-132 to Trp-137, Gly-169 to Asp-184. |
| 588881 | Preferred epitopes include those comprising a sequence shown in SEQ ID NO. 485 as |
| | residues: Leu-9 to Thr-17, Ser-56 to Trp-62, Asp-93 to Asp-101, Thr-249 to Thr-255. |
| 588933 | Preferred epitopes include those comprising a sequence shown in SEQ ID NO. 486 as |
| | residues: His-1 to Ser-6, Trp-29 to Pro-35, Asp-37 to Gly-43, Thr-45 to Leu-61, Lys-72 |
| | to Thr-77, Glu-83 to Tyr-90, His-129 to Gln-135. |
| 592136 | Preferred epitopes include those comprising a sequence shown in SEQ ID NO. 487 as |
| | residues: His-1 to Thr-8, Arg-22 to Thr-28, Met-46 to Asn-51. |
| 613777 | Preferred epitopes include those comprising a sequence shown in SEQ ID NO. 488 as |
| | residues: Ala-16 to Glu-27, Lys-34 to Ser-48, Cys-54 to Thr-61, Cys-120 to Trp-128. |
| 614669 | Preferred epitopes include those comprising a sequence shown in SEQ ID NO. 489 as |
| | residues: Glu-1 to Arg-10, Ser-17 to Gly-23, Asp-49 to Lys-54, Glu-71 to Val-78, Asp- |
| | 99 to Gly-104, Asp-156 to Arg-161, Gln-211 to Cys-220, Ser-234 to Tyr-239, Ser-254 to |
| | Arg-264. |
| 619502 | Preferred epitopes include those comprising a sequence shown in SEQ ID NO. 490 as |
| | residues: Glu-4 to Glu-25, Leu-39 to Val-45, Leu-49 to Glu-62, Gly-73 to Lys-83. |
| 619525 | Preferred epitopes include those comprising a sequence shown in SEQ ID NO. 491 as |
| | residues: Glu-24 to Gly-47, Gln-196 to Ala-202, Ala-234 to Arg-239. |
| 623660 | Preferred epitopes include those comprising a sequence shown in SEQ ID NO. 492 as |
| | residues: Val-12 to Asn-22, Pro-95 to Gly-100, Leu-118 to Ser-132. |
| 625480 | Preferred epitopes include those comprising a sequence shown in SEQ ID NO. 493 as |
| | residues: Gly-23 to Ser-33. |
| 647688 | Preferred epitopes include those comprising a sequence shown in SEQ ID NO. 494 as |
| | residues: Gly-1 to Leu-7. |
| 650865 | Preferred epitopes include those comprising a sequence shown in SEQ ID NO. 495 as |
| | residues: Asp-1 to Ala-7. |
| 651676 | Preferred epitopes include those comprising a sequence shown in SEQ ID NO. 496 as |
| | residues: Ile-55 to Asp-60, Glu-82 to Lys-94, Glu-115 to Asp-128. |
| 651751 | Preferred epitopes include those comprising a sequence shown in SEQ ID NO. 497 as |
| | residues: Ala-1 to Thr-8, Arg-15 to Ser-22, Arg-122 to Gly-138, Gln-145 to Lys-156. |
| 651840 | Preferred epitopes include those comprising a sequence shown in SEQ ID NO. 499 as |
| | residues: Pro-1 to Glu-6, Pro-16 to Ser-21, Pro-23 to Tyr-31, Asp-48 to Val-60, Phe-68 |
| | to Lys-76, Tyr-79 to Asn-93, Lys-105 to Ser-114, Gly-125 to Gly-130, Asp-160 to Leu- |
| | 175, Asn-179 to Pro-188, Val-196 to Lys-203, Pro-209 to Arg-217, Ser-243 to Leu-252, |
| | Arg-274 to Ile-282, Ser-368 to Phe-373, Gln-383 to Gly-388, Asn-403 to Gly-408, Gle- |
| | 429 to Ile-438. |
| 652557 | Preferred epitopes include those comprising a sequence shown in SEQ ID NO. 501 as |
| | residues: Gly-55 to Leu-62, Ala-80 to Ile-87, Arg-110 to Arg-118. |
| 653011 | Preferred epitopes include those comprising a sequence shown in SEQ ID NO. 502 as |
| | residues: Ser-47 to Cys-57. |
| 656930 | Preferred epitopes include those comprising a sequence shown in SEQ ID NO. 504 as |
| | residues: His-13 to Asn-18, Met-40 to Arg-45, Asp-73 to Lys-80, Glu-85 to Glu-90, |
| | Gln-97 to Cys-107, Gln-119 to Ala-124, Thr-188 to Trp-194, Asp-241 to Cys-251. |
| 659023 | Preferred epitopes include those comprising a sequence shown in SEQ ID NO. 505 as |
| | residues: Ile-1 to Ala-19. |
| 660696 | Preferred epitopes include those comprising a sequence shown in SEQ ID NO. 507 as |
| | residues: Val-1 to Gly-9, Pro-17 to Gly-24, Gly-39 to Gly-45, Lys-65 to Asp-70. |
| 666881 | Preferred epitopes include those comprising a sequence shown in SEQ ID NO. 508 as |
| | residues: Pro-2 to Gly-7. |
| 681507 | Preferred epitopes include those comprising a sequence shown in SEQ ID NO. 511 as |
| | residues: Ala-6 to Cys-18, Pro-71 to Gly-87, Ile-95 to Val-101, Ser-104 to Lys-112, |
| | Glu-117 to Ala-125, Gly-127 to Glu-142, Pro-150 to Ala-164, Leu-168 to Glu-187. |
| 683116 | Preferred epitopes include those comprising a sequence shown in SEQ ID NO. 513 as |
| | residues: Pro-1 to Gly-15. |
| 686494 | Preferred epitopes include those comprising a sequence shown in SEQ ID NO. 514 as |
| | residues: Pro-10 to Glu-19, Asn-46 to Arg-52. |
| 688221 | Preferred epitopes include those comprising a sequence shown in SEQ ID NO. 516 as |
| | residues: Arg-4 to Gly-17, Pro-39 to Lys-46, His-96 to Arg-102, Ala-214 to Ile-222, |
| | Glu-247 to Lys-255. |
| 705227 | Preferred epitopes include those comprising a sequence shown in SEQ ID NO. 519 as |
| | residues: Lys-6 to Trp-11, Lys-32 to Glu-37, Lys-48 to Thr-54. |
| 705958 | Preferred epitopes include those comprising a sequence shown in SEQ ID NO. 520 as |
| | residues: Pro-1 to Glu-14, Ala-25 to Ala-32. |
| 705965 | Preferred epitopes include those comprising a sequence shown in SEQ ID NO. 521 as |
| | residues: Gly-14 to Gly-22, Gln-35 to Arg-60, Thr-70 to Lys-80, Arg-87 to Ala-99. |
| 707380 | Preferred epitopes include those comprising a sequence shown in SEQ ID NO. 524 as |
| | residues: Leu-1 to Ala-7. |
| 707779 | Preferred epitopes include those comprising a sequence shown in SEQ ID NO. 525 as |
| | residues: Ser-9 to Pro-26, Ala-57 to Asp-66, Thr-76 to Gly-81, Pro-93 to Glu-101, Phe- |
| | 111 to Phe-124, Glu-145 to Trp-150, Pro-170 to Ala-176. |
| 709441 | Preferred epitopes include those comprising a sequence shown in SEQ ID NO. 526 as |
| | residues: Glu-8 to Ala-18, Pro-60 to Glu-66, Val-71 to Arg-76. |
| 710443 | Preferred epitopes include those comprising a sequence shown in SEQ ID NO. 527 as |
| | residues: Thr-28 to Ser-40, Pro-100 to Leu-105, Arg-123 to Ser-129, Lys-153 to Asn- |
| | 162, Arg-171 to Lys-182, Pro-228 to Pro-245, Ser-249 to Ser-257, Ser-279 to Pro-288, |
| | Val-297 to Glu-322, Val-335 to Asn-340. |
| 710616 | Preferred epitopes include those comprising a sequence shown in SEQ ID NO. 529 as |
| | residues: His-1 to Gly-12, Gln-76 to Tyr-83, Ile-93 to Ser-98, Pro-116 to Ser-123, Gln- |
| | 159 to Gln-164. |
| 710662 | Preferred epitopes include those comprising a sequence shown in SEQ ID NO. 530 as |
| | residues: Asn-12 to Val-17, Gly-24 to Val-29, Lys-56 to Val-67, Pro-69 to Thr-74, Arg- |
| | 8 to Gly-87. |
| 710917 | Preferred epitopes include those comprising a sequence shown in SEQ ID NO. 531 as |
| | residues: Glu-1 to Gly-10, Gly-78 to Thr-87, Asn-124 to Arg-136, Ser-223 to Asp-244, |
| | Lys-247 to Thr-252, Asp-265 to Gly-274, Glu-279 to Ile-312, Thr-334 to Glu-340, Gln- |
| | 345 to Gln-350, Arg-356 to Glu-368, Asn-375 to Arg-381, Glu-398 to Leu-406, Ser-435 |
| | to His-441, Ala-453 to Arg-458, Glu-492 to Ser-497, Leu-519 to Asp-525, Ser-543 to |
| | Glu-549, Pro-563 to Gly-569, Ser-587 to Asp-592, Glu-617 to Ser-622, Arg-659 to Gly- |
| | 664, Leu-677 to His-683, Asn-685 to Lys-698. |
| 711866 | Preferred epitopes include those comprising a sequence shown in SEQ ID NO. 532 as |
| | residues: Arg-27 to Arg-33, Ser-35 to Gln-40. |
| 714903 | Preferred epitopes include those comprising a sequence shown in SEQ ID NO. 533 as |
| | residues: Arg-2 to Ile-7. |
| 718139 | Preferred epitopes include those comprising a sequence shown in SEQ ID NO. 534 as |
| | residues: Phe-1 to Glu-7, Pro-22 to Tyr-27, Ala-108 to Lys-114, Thr-134 to Phe-139, |
| | Ala-170 to Ala-183, Ser-216 to Asp-231, Cys-235 to Ser-244. |
| 719142 | Preferred epitopes include those comprising a sequence shown in SEQ ID NO. 535 as |
| | residues: Ser-31 to Gly-37, Pro-39 to Pro-44, Ile-66 to Trp-71, Ser-117 to Leu-123. |
| 719914 | Preferred epitopes include those comprising a sequence shown in SEQ ID NO. 537 as |
| | residues: Pro-77 to Cys-85, Asp-195 to Lys-214, Pro-231 to Thr-238. |
| 720134 | Preferred epitopes include those comprising a sequence shown in SEQ ID NO. 538 as |
| | residues: Arg-13 to Ser-19. |
| 720583 | Preferred epitopes include those comprising a sequence shown in SEQ ID NO. 540 as |
| | residues: Met-18 to Ser-26, Ile-35 to Lys-47, Glu-52 to Gln-57, Arg-71 to Asp-79. |
| 720904 | Preferred epitopes include those comprising a sequence shown in SEQ ID NO. 541 as |
| | residues: Ala-72 to Arg-80, Trp-88 to Tyr-94, Tyr-112 to Met-118, Asp-131 to Val-138, |
| | Lys-168 to Lys-173. |
| 721194 | Preferred epitopes include those comprising a sequence shown in SEQ ID NO. 542 as |
| | residues: Asp-39 to Lys-44, Ala-115 to Thr-122. |
| 721271 | Preferred epitopes include those comprising a sequence shown in SEQ ID NO. 543 as |
| | residues: Lys-24 to Gly-32, Pro-53 to Leu-59. |
| 723886 | Preferred epitopes include those comprising a sequence shown in SEQ ID NO. 544 as |
| | residues: Thr-16 to Ser-22, Pro-44 to Ser-49, Ser-53 to Phe-58. |
| 723968 | Preferred epitopes include those comprising a sequence shown in SEQ ID NO. 545 as |
| | residues: Asp-33 to Asp-65, Trp-85 to Tyr-90, Asp-101 to Gly-109. |
| 726034 | Preferred epitopes include those comprising a sequence shown in SEQ ID NO. 548 as |
| | residues: Gln-6 to Ala-11. |
| 726602 | Preferred epitopes include those comprising a sequence shown in SEQ ID NO. 549 as |
| | residues: Pro-5 to Ala-11, Pro-24 to Leu-29, Glu-45 to Ser-51. |
| 726965 | Preferred epitopes include those comprising a sequence shown in SEQ ID NO. 550 as |
| | residues: Glu-5 to Leu-17, Leu-37 to Arg-44, Gly-50 to Gly-57, Val-72 to Arg-80, Asn- |
| | 94 to Lys-99, Pro-107 to Ala-113. |
| 727809 | Preferred epitopes include those comprising a sequence shown in SEQ ID NO. 551 as |
| | residues: Gly-8 to Trp-16, Asn-22 to Phe-28, Phe-68 to Arg-75, Ser-93 to Ser-101, Glu- |
| | 114 to Ile-126, Pro-134 to Phe-143, Gly-165 to Gly-176, Lys-191 to Glu-201, Thr-218 to |
| | Lys-227, Tyr-289 to Phe-299. |
| 731703 | Preferred epitopes include those comprising a sequence shown in SEQ ID NO. 552 as |
| | residues: Pro-8 to Phe-15, His-28 to Pro-34, Gln-50 to Tyr-64, Asp-69 to Tyr-74, Lys-79 |
| | to Pro-84, Ala-95 to Thr-105. |
| 732840 | Preferred epitopes include those comprising a sequence shown in SEQ ID NO. 553 as |
| | residues: Thr-2 to Ser-10, Pro-12 to Thr-22, Val-90 to Pro-98, Ile-175 to Val-181. |
| 733749 | Preferred epitopes include those comprising a sequence shown in SEQ ID NO. 555 as |
| | residues: Ser-70 to Thr-76, Ala-94 to Thr-101, Thr-105 to Lys-115, Lys-120 to Gln-138, |
| | Lys-143 to Gly-150. |
| 734637 | Preferred epitopes include those comprising a sequence shown in SEQ ID NO. 557 as |
| | residues: Ala-35 to Ile-40, Glu-60 to Asp-65, Pro-67 to Glu-85, Ser-97 to Tyr-104. |
| 734638 | Preferred epitopes include those comprising a sequence shown in SEQ ID NO. 558 as |
| | residues: Ala-35 to Ile-40, Glu-60 to Asp-65, Pro-67 to Glu-85, Ser-97 to Tyr-104, Ile- |
| | 124 to Pro-132, Thr-164 to Ser-169, Phe-301 to Asp-306, Met-354 to Asn-360, Thr-368 |
| | to Asn-377, Ser-382 to Gly-396, Asp-413 to Thr-425. |
| 738846 | Preferred epitopes include those comprising a sequence shown in SEQ ID NO. 560 as |
| | residues: Leu-35 to Arg-41. |
| 740584 | Preferred epitopes include those comprising a sequence shown in SEQ ID NO. 561 as |
| | residues: Lys-1 to Lys-16. |
| 741213 | Preferred epitopes include those comprising a sequence shown in SEQ ID NO. 562 as |
| | residues: Glu-1 to Gln-34, Lys-103 to Ile-116. |
| 741229 | Preferred epitopes include those comprising a sequence shown in SEQ ID NO. 563 as |
| | residues: Ser-2 to Gln-10, Gly-18 to Pro-24, Lys-52 to Lys-58, Ala-62 to Lys-67, Ser-74 |
| | to Arg-80, Gln-95 to Pro-104, Gly-109 to Ser-116, Ile-142 to Arg-150, Pro-164 to Ala- |
| | 169, Thr-207 to Asp-215, His-235 to Asp-241, Arg-273 to Gly-278, Gln-295 to Glu-301, |
| | Ser-336 to Arg-345. |
| 741299 | Preferred epitopes include those comprising a sequence shown in SEQ ID NO. 564 as |
| | residues: Arg-1 to Lys-8, Gly-145 to Gly-155, Gly-205 to His-210, Ile-313 to His-318. |
| 744680 | Preferred epitopes include those comprising a sequence shown in SEQ ID NO. 566 as |
| | residues: Ile-11 to Gly-19, Ala-26 to Cys-39. |
| 744705 | Preferred epitopes include those comprising a sequence shown in SEQ ID NO. 567 as |
| | residues: Pro-13 to Glu-21, Ala-23 to Thr-30, Lys-78 to Ser-85, Arg-131 to Thr-139. |
| 745337 | Preferred epitopes include those comprising a sequence shown in SEQ ID NO. 568 as |
| | residues: His-126 to Leu-131, Cys-181 to Pro-186, Ala-220 to Ser-226, Leu-574 to Asp- |
| | 581. |
| 750595 | Preferred epitopes include those comprising a sequence shown in SEQ ID NO. 571 as |
| | residues: Met-72 to Thr-77, Ala-87 to Lys-95. |
| 750633 | Preferred epitopes include those comprising a sequence shown in SEQ ID NO. 572 as |
| | residues: Glu-113 to Phe-132. |
| 750766 | Preferred epitopes include those comprising a sequence shown in SEQ ID NO. 573 as |
| | residues: Arg-30 to Ala-40, Lys-62 to Phe-67, Ile-84 to Asn-89, Arg-91 to Lys-100, Ile- |
| | 115 to Glu-120, Gly-135 to Leu-144, Pro-146 to Ala-159, Ala-214 to Glu-219, Arg-255 |
| | to Ile-261, Pro-275 to Lys-283. |
| 754538 | Preferred epitopes include those comprising a sequence shown in SEQ ID NO. 575 as |
| | residues: Ser-6 to Glu-13, Glu-21 to Asp-31, Arg-54 to Trp-70, Leu-115 to Glu-120. |
| 754820 | Preferred epitopes include those comprising a sequence shown in SEQ ID NO. 576 as |
| | residues: Asp-5 to Lys-11, Met-75 to Lys-87, Lys-96 to Gln-102. |
| 756565 | Preferred epitopes include those comprising a sequence shown in SEQ ID NO. 577 as |
| | residues: Lys-13 to Asn-25, Glu-36 to Ser-47. |
| 756793 | Preferred epitopes include those comprising a sequence shown in SEQ ID NO. 578 as |
| | residues: Arg-26 to Lys-40. |
| 757431 | Preferred epitopes include those comprising a sequence shown in SEQ ID NO. 579 as |
| | residues: Glu-64 to Pro-71, Leu-97 to Lys-104, Ser-147 to Glu-152. |
| 757478 | Preferred epitopes include those comprising a sequence shown in SEQ ID NO. 580 as |
| | residues: Asp-1 to Trp-10, Ala-19 to Ser-25, Thr-31 to Ser-42, Cys-128 to Gly-135, Gly- |
| | 137 to Thr-143, Pro-179 to Lys-192. |
| 760876 | Preferred epitopes include those comprising a sequence shown in SEQ ID NO. 582 as |
| | residues: Ser-35 to Pro-48, Pro-56 to Trp-65, Ser-67 to Lys-76. |
| 761528 | Preferred epitopes include those comprising a sequence shown in SEQ ID NO. 583 as |
| | residues: Pro-4 to Gly-10, Thr-38 to Lys-43, Leu-54 to Gly-59, Glu-107 to Glu-116, |
| | Pro-194 to Lys-199, Leu-207 to Asn-212, Arg-227 to Ala-239, Lys-285 to Lys-294, Glu- |
| | 300 to Phe-306, Gln-315 to Tyr-327, Ala-353 to Gly-360. |
| 764913 | Preferred epitopes include those comprising a sequence shown in SEQ ID NO. 586 as |
| | residues: Glu-83 to Ser-89, Ile-127 to Lys-132, Ser-134 to Asn-140, Tyr-176 to Asn- |
| | 197, Gly-217 to Ser-233. |
| 764941 | Preferred epitopes include those comprising a sequence shown in SEQ ID NO. 587 as |
| | residues: Asn-7 to Ser-12, Asn-35 to Phe-43. |
| 765903 | Preferred epitopes include those comprising a sequence shown in SEQ ID NO. 588 as |
| | residues: Leu-65 to Thr-74. |
| 766122 | Preferred epitopes include those comprising a sequence shown in SEQ ID NO. 589 as |
| | residues: Ser-1 to Gly-10, Arg-30 to Asp-36, Asp-59 to Pro-64. |
| 766719 | Preferred epitopes include those comprising a sequence shown in SEQ ID NO. 590 as |
| | residues: Gln-12 to Cys-20, His-43 to Cys-49, Leu-51 to His-64, Pro-82 to Val-88. |
| 767941 | Preferred epitopes include those comprising a sequence shown in SEQ ID NO. 592 as |
| | residues: Tyr-12 to Glu-20. |
| 768035 | Preferred epitopes include those comprising a sequence shown in SEQ ID NO. 593 as |
| | residues: Phe-30 to Pro-40. |
| 769888 | Preferred epitopes include those comprising a sequence shown in SEQ ID NO. 594 as |
| | residues: His-53 to His-59, Asn-72 to Ile-81, Glu-153 to Lys-178, Pro-186 to Ser-195. |
| 771671 | Preferred epitopes include those comprising a sequence shown in SEQ ID NO. 595 as |
| | residues: Arg-32 to Ala-37. |
| 772876 | Preferred epitopes include those comprising a sequence shown in SEQ ID NO. 596 as |
| | residues: Arg-80 to Thr-91. |
| 773398 | Preferred epitopes include those comprising a sequence shown in SEQ ID NO. 598 as |
| | residues: Pro-12 to Arg-19, Lys-29 to Val-41. |
| 773927 | Preferred epitopes include those comprising a sequence shown in SEQ ID NO. 600 as |
| | residues: Gly-84 to Leu-91, Glu-122 to Pro-136, Phe-176 to Ser-197, Lys-207 to Lys- |
| | 212, Pro-222 to Glu-233, Ser-246 to Tyr-257. |
| 774100 | Preferred epitopes include those comprising a sequence shown in SEQ ID NO. 601 as |
| | residues: Gly-1 to Pro-9, Arg-26 to Asp-31, Asp-33 to Val-58, Ser-60 to Gly-65, Pro-78 |
| | to Arg-90, Ser-132 to Ser-137. |
| 774101 | Preferred epitopes include those comprising a sequence shown in SEQ ID NO. 602 as |
| | residues: Thr-73 to Glu-78. |
| 774341 | Preferred epitopes include those comprising a sequence shown in SEQ ID NO. 604 as |
| | residues: Asp-82 to Glu-92, Lys-126 to Thr-131, Tyr-140 to Leu-151, Tyr-206 to Ser- |
| | 211. |
| 774371 | Preferred epitopes include those comprising a sequence shown in SEQ ID NO. 605 as |
| | residues: Pro-29 to Arg-36. |
| 777534 | Preferred epitopes include those comprising a sequence shown in SEQ ID NO. 606 as |
| | residues: Arg-11 to Arg-18, Asn-93 to Lys-98, Glu-108 to Asn-116, Pro-124 to Lys-134, |
| | Ile-303 to Glu-308, Arg-328 to Lys-334, Arg-355 to Lys-363, Arg-387 to Lys-393. |
| 777623 | Preferred epitopes include those comprising a sequence shown in SEQ ID NO. 607 as |
| | residues: Glu-14 to Thr-24. |
| 779194 | Preferred epitopes include those comprising a sequence shown in SEQ ID NO. 608 as |
| | residues: Lys-29 to Thr-42. |
| 779387 | Preferred epitopes include those comprising a sequence shown in SEQ ID NO. 609 as |
| | residues: Pro-1 to His-6. |
| 779818 | Preferred epitopes include those comprising a sequence shown in SEQ ID NO. 611 as |
| | residues: Pro-38 to Glu-44, Glu-67 to Cys-72, Ala-81 to Leu-86, Pro-100 to Asn-111, |
| | Asp-120 to Gly-127, Arg-150 to Cys-162, Gln-184 to Gln-191, Tyr-211 to Cys-221, |
| | Asp-242 to His-250, Cys-269 to Ser-280, Glu-292 to Trp-299. |
| 780634 | Preferred epitopes include those comprising a sequence shown in SEQ ID NO. 613 as |
| | residues: Asp-1 to Lys-6, Cys-19 to Gly-27, Glu-36 to Gln-42. |
| 780638 | Preferred epitopes include those comprising a sequence shown in SEQ ID NO. 614 as |
| | residues: Asn-3 to Val-12, Pro-27 to Leu-35, Ile-70 to Gly-79, Tyr-135 to Tyr-140, Cys- |
| | 142 to Tyr-148, Ser-171 to Leu-177, Ser-199 to Ser-207. |
| 780773 | Preferred epitopes include those comprising a sequence shown in SEQ ID NO. 615 as |
| | residues: Gly-16 to Ser-32, Gly-47 to Ala-54. |
| 780778 | Preferred epitopes include those comprising a sequence shown in SEQ ID NO. 616 as |
| | residues: Tyr-12 to Thr-17. |
| 780873 | Preferred epitopes include those comprising a sequence shown in SEQ ID NO. 617 as |
| | residues: Leu-4 to Trp-12, Tyr-46 to Arg-53, Asn-108 to Asp-114. |
| 782113 | Preferred epitopes include those comprising a sequence shown in SEQ ID NO. 618 as |
| | residues: Ala-2 to Cys-7. |
| 782153 | Preferred epitopes include those comprising a sequence shown in SEQ ID NO. 619 as |
| | residues: Ser-10 to His-16, Pro-26 to Asn-31, Val-74 to Asn-88, Asp-158 to Glu-165, |
| | Ile-205 to Arg-213. |
| 782376 | Preferred epitopes include those comprising a sequence shown in SEQ ID NO. 620 as |
| | residues: Thr-1 to Ser-15. |
| 782420 | Preferred epitopes include those comprising a sequence shown in SEQ ID NO. 621 as |
| | residues: Asp-1 to Gly-8. |
| 782672 | Preferred epitopes include those comprising a sequence shown in SEQ ID NO. 622 as |
| | residues: Cys-116 to Glu-126. |
| 783148 | Preferred epitopes include those comprising a sequence shown in SEQ ID NO. 623 as |
| | residues: Asp-43 to His-52. |
| 783510 | Preferred epitopes include those comprising a sequence shown in SEQ ID NO. 624 as |
| | residues: Pro-16 to Glu-23, Gly-71 to Leu-76, Asn-83 to Asp-93, Lys-121 to Arg-132, |
| | Val-137 to Trp-142, Glu-245 to Val-252, Pro-377 to Ser-385. |
| 783734 | Preferred epitopes include those comprising a sequence shown in SEQ ID NO. 625 as |
| | residues: Leu-1 to Gln-75, Glu-79 to Ile-84, Gln-116 to Gln-123. |
| 784201 | Preferred epitopes include those comprising a sequence shown in SEQ ID NO. 626 as |
| | residues: Arg-7 to Val-14, Glu-48 to Gly-58, Ser-74 to Gln-83, Asp-101 to Asp-107, Ile- |
| | 113 to Asn-118. |
| 784381 | Preferred epitopes include those comprising a sequence shown in SEQ ID NO. 627 as |
| | residues: Thr-122 to Ala-130. |
| 784387 | Preferred epitopes include those comprising a sequence shown in SEQ ID NO. 628 as |
| | residues: Glu-42 to Ser-51, Asp-74 to Pro-86, Thr-104 to Gly-110, Pro-131 to Gly-138. |
| 784639 | Preferred epitopes include those comprising a sequence shown in SEQ ID NO. 629 as |
| | residues: Arg-1 to Lys-6, Asn-31 to Lys-39, Ala-66 to Gln-72, Ser-112 to Asn-118, Ile- |
| | 128 to Ala-136, Cys-144 to Asn-149, Ala-174 to Glu-180, Ile-191 to Ser-202. |
| 784641 | Preferred epitopes include those comprising a sequence shown in SEQ ID NO. 630 as |
| | residues: Asn-18 to Leu-24, Asp-42 to Gly-50, Ala-84 to Gly-94, Gly-100 to Asn-159. |
| 785142 | Preferred epitopes include those comprising a sequence shown in SEQ ID NO. 632 as |
| | residues: Val-37 to Ala-42, Lys-82 to Ala-94, Asp-110 to Gly-118, Pro-132 to Lys-141, |
| | Ser-150 to Glu-161, Pro-199 to Asp-221, Leu-223 to Ser-237, Gln-255 to Gln-269, Phe- |
| | 275 to Phe-298, Gln-323 to Asp-335, Pro-343 to Ala-359, Pro-375 to Gln-384, Thr-386 |
| | to Pro-392, Pro-529 to Ile-541, Leu-552 to Val-560, Arg-578 to Ser-584, Pro-602 to Phe- |
| | 611, Lys-619 to Arg-629, Glu-668 to Phe-674. |
| 786283 | Preferred epitopes include those comprising a sequence shown in SEQ ID NO. 635 as |
| | residues: Glu-16 to Gln-23. |
| 786511 | Preferred epitopes include those comprising a sequence shown in SEQ ID NO. 637 as |
| | residues: Ser-13 to Ser-24. |
| 787330 | Preferred epitopes include those comprising a sequence shown in SEQ ID NO. 638 as |
| | residues: Ala-1 to Ala-9, Pro-13 to Val-20, Asn-27 to Thr-36, Pro-44 to Asn-56, Glu-71 |
| | to Arg-76, Glu-81 to Gln-96, Pro-104 to Leu-111, Leu-115 to Gln-120, Asp-139 to Ile- |
| | 149. |
| 787377 | Preferred epitopes include those comprising a sequence shown in SEQ ID NO. 639 as |
| | residues: Ala-15 to His-24, Asp-32 to Pro-42, Val-53 to Gln-58, Pro-61 to Ile-77. |
| 787662 | Preferred epitopes include those comprising a sequence shown in SEQ ID NO. 640 as |
| | residues: Pro-68 to Leu-74. |
| 789466 | Preferred epitopes include those comprising a sequence shown in SEQ ID NO. 643 as |
| | residues: Lys-1 to Asp-9, Asn-62 to Met-69, Glu-71 to Ile-77. |
| 791673 | Preferred epitopes include those comprising a sequence shown in SEQ ID NO. 645 as |
| | residues: Arg-72 to Glu-84. |
| 792080 | Preferred epitopes include those comprising a sequence shown in SEQ ID NO. 646 as |
| | residues: Asn-47 to Asp-53, Ser-75 to Ala-80. |
| 793025 | Preferred epitopes include those comprising a sequence shown in SEQ ID NO. 647 as |
| | residues: Glu-52 to Lys-58. |
| 793043 | Preferred epitopes include those comprising a sequence shown in SEQ ID NO. 648 as |
| | residues: Ser-1 to Gly-8, Ile-71 to Ala-83, Asp-91 to Arg-96. |
| 793386 | Preferred epitopes include those comprising a sequence shown in SEQ ID NO. 649 as |
| | residues: Gly-23 to Ala-56, Thr-58 to Ser-65, Gly-69 to Glu-140, Ser-158 to Gly-165, |
| | Thr-169 to Arg-175, Pro-181 to Glu-186. |
| 795144 | Preferred epitopes include those comprising a sequence shown in SEQ ID NO. 650 as |
| | residues: Arg-2 to Ser-14, Arg-18 to Glu-26, Ile-62 to Ser-72, Asp-132 to Asp-138, Thr- |
| | 147 to Arg-163, Cys-180 to Asn-194, Asp-199 to Glu-205, Arg-212 to Leu-218, Thr-248 |
| | to Arg-270, Leu-278 to Ala-286, Gln-322 to Phe-329. |
| 795911 | Preferred epitopes include those comprising a sequence shown in SEQ ID NO. 651 as |
| | residues: His-4 to Asn-11. |
| 795962 | Preferred epitopes include those comprising a sequence shown in SEQ ID NO. 652 as |
| | residues: Pro-63 to Gly-71, Arg-96 to Gly-101, Phe-106 to Leu-111, Arg-124 to Met- |
| | 130, Cys-154 to Ala-160, Glu-163 to Ser-169, Arg-180 to Phe-191. |
| 796221 | Preferred epitopes include those comprising a sequence shown in SEQ ID NO. 653 as |
| | residues: Leu-12 to Gly-41, Ser-54 to Gly-62, Trp-107 to Pro-113, Glu-140 to Lys-145, |
| | Leu-147 to Lys-155, Arg-177 to Asp-183, Glu-189 to Lys-197, Leu-202 to Thr-207, |
| | Leu-275 to Asp-283. |
| 796283 | Preferred epitopes include those comprising a sequence shown in SEQ ID NO. 654 as |
| | residues: Ser-1 to Ser-12, Pro-87 to Arg-92. |
| 796392 | Preferred epitopes include those comprising a sequence shown in SEQ ID NO. 655 as |
| | residues: Glu-16 to Gly-28, Glu-54 to Asp-75, Lys-92 to Lys-101, Tyr-106 to Glu-118, |
| | Glu-127 to Val-164, Ser-172 to Lys-185, Arg-199 to Phe-236, Arg-255 to Ser-262, Pro- |
| | 265 to Glu-275. |
| 797655 | Preferred epitopes include those comprising a sequence shown in SEQ ID NO. 656 as |
| | residues: Pro-34 to Val-40, Pro-47 to Asp-58, Pro-60 to Leu-67, Ser-74 to Ala-81, Pro- |
| | 99 to Arg-127, Thr-145 to Gln-155. |
| 799486 | Preferred epitopes include those comprising a sequence shown in SEQ ID NO. 657 as |
| | residues: Ala-9 to Asp-15, Trp-132 to Val-139. |
| 800221 | Preferred epitopes include those comprising a sequence shown in SEQ ID NO. 659 as |
| | residues: Asn-41 to Lys-53, Tyr-94 to Ile-99, Asp-123 to Thr-136. |
| 800376 | Preferred epitopes include those comprising a sequence shown in SEQ ID NO. 660 as |
| | residues: Arg-7 to Ala-14, Gln-80 to Ser-88, Val-96 to Gln-101, Lys-149 to Tyr-159, |
| | Gln-177 to Arg-185. |
| 800567 | Preferred epitopes include those comprising a sequence shown in SEQ ID NO. 661 as |
| | residues: Gly-1 to Ala-21, Ser-262 to Asn-274, Pro-277 to Cys-285, Pro-291 to Gly-303, |
| | Pro-310 to Gly-315, Pro-321 to Ala-326, Asn-334 to Ser-342, Gly-380 to Arg-386. |
| 800652 | Preferred epitopes include those comprising a sequence shown in SEQ ID NO. 662 as |
| | residues: Ser-15 to Gln-20, Asp-25 to Tyr-32, Phe-35 to Tyr-62, Arg-94 to Lys-102, |
| | Glu-137 to Phe-146, Phe-148 to Phe-158, Arg-166 to Gly-177, Met-180 to Asn-194, |
| | Arg-198 to Gln-212, Ala-236 to Glu-241, Val-243 to Glu-248. |
| 800748 | Preferred epitopes include those comprising a sequence shown in SEQ ID NO. 663 as |
| | residues: Glu-20 to Leu-33, Tyr-59 to Pro-69, Ala-92 to Asp-102, Leu-120 to Cys-129, |
| | Glu-143 to Tyr-148, Pro-168 to Leu-173, Asp-179 to Val-189, Thr-221 to Pro-228, Asp- |
| | 249 to Ser-261, Thr-336 to Lys-342, Pro-377 to Asp-387, Arg-391 to Gly-397, Asp-428 |
| | to Ile-434, Asn-529 to Thr-559. |
| 802032 | Preferred epitopes include those comprising a sequence shown in SEQ ID NO. 664 as |
| | residues: Glu-74 to Trp-82. |
| 802050 | Preferred epitopes include those comprising a sequence shown in SEQ ID NO. 665 as |
| | residues: Ser-28 to Cys-38. |
| 805551 | Preferred epitopes include those comprising a sequence shown in SEQ ID NO. 666 as |
| | residues: Pro-6 to Tyr-19. |
| 805662 | Preferred epitopes include those comprising a sequence shown in SEQ ID NO. 667 as |
| | residues: Arg-29 to Ser-35, Ser-79 to Gly-91, Pro-105 to Arg-120, Thr-168 to Glu-175, |
| | Phe-187 to Ala-200, Arg-272 to Lys-282, Arg-325 to Asp-330, Arg-332 to Phe-338, |
| | Arg-358 to Lys-368, Cys-433 to Asn-441, Leu-456 to Asp-461. |
| 805750 | Preferred epitopes include those comprising a sequence shown in SEQ ID NO. 668 as |
| | residues: Glu-6 to Arg-13, Ser-53 to Gly-60, Arg-84 to Gln-90, Pro-10l to Thr-106. |
| 805860 | Preferred epitopes include those comprising a sequence shown in SEQ ID NO. 669 as |
| | residues: Thr-3 to Thr-8, Thr-55 to Ala-60. |
| 805886 | Preferred epitopes include those comprising a sequence shown in SEQ ID NO. 670 as |
| | residues: Trp-3 to Gly-16, Pro-19 to Ser-30, Gly-68 to Glu-74, Pro-81 to Lys-86, Ser-93 |
| | to Trp-98, Arg-102 to Asp-115, Arg-203 to Gly-210. |
| 806706 | Preferred epitopes include those comprising a sequence shown in SEQ ID NO. 671 as |
| | residues: Ser-10 to Ser-18, Arg-26 to Gly-33, Val-47 to Leu-60, Gly-79 to Phe-86, Gln- |
| | 94 to Ser-99, Leu-126 to Cys-131. |
| 811637 | Preferred epitopes include those comprising a sequence shown in SEQ ID NO. 672 as |
| | residues: Arg-8 to Gly-20, Ala-27 to Ser-39, Gly-41 to Trp-55, Arg-58 to Gly-66, Asp- |
| | 70 to Ser-88, Asp-108 to Tyr-117, Val-155 to Asn-164, Ile-168 to Lys-174, Lys-177 to |
| | Val-182, Pro-192 to Arg-200, Met-216 to Gly-225, Lys-232 to Val-237, Lys-261 to Arg- |
| | 273, Ala-280 to Tyr-307. |
| 812338 | Preferred epitopes include those comprising a sequence shown in SEQ ID NO. 674 as |
| | residues: Pro-11 to Lys-18, Pro-25 to Ala-32, Gly-59 to Gly-64, Asn-73 to Phe-78. |
| 812439 | Preferred epitopes include those comprising a sequence shown in SEQ ID NO. 675 as |
| | residues: Leu-1 to Asn-7, Met-9 to Gln-14, His-25 to Gly-36, Phe-44 to Asp-49, Cys-61 |
| | to Cys-69, Gly-80 to Phe-85, Pro-91 to Gly-103, Asp-121 to Trp-128, Asp-130 to Ala- |
| | 170, Trp-172 to Cys-183, Lys-193 to Asp-l99, Pro-201 to Cys-210, Pro-217 to Asp-237, |
| | Thr-274 to Asn-280, Gly-292 to Cys-298, Asp-316 to Asp-326, Gly-339 to Asn-350. |
| 812645 | Preferred epitopes include those comprising a sequence shown in SEQ ID NO. 676 as |
| | residues: Tyr-99 to Glu-105, Gly-123 to His-139, Ile-148 to Glu-154. |
| 812770 | Preferred epitopes include those comprising a sequence shown in SEQ ID NO. 677 as |
| | residues: Ser-7 to Ser-16, Gln-41 to Ala-67, Glu-84 to Arg-91, Lys-98 to Gly-112, Arg- |
| | 119 to Met-127, Glu-143 to Glu-149, Asp-161 to Ala-169, Ser-174 to Gln-182, Glu-197 |
| | to Glu-210, Lys-217 to Arg-224. |
| 813080 | Preferred epitopes include those comprising a sequence shown in SEQ ID NO. 679 as |
| | residues: Trp-47 to Val-55, Thr-142 to Ser-155. |
| 815326 | Preferred epitopes include those comprising a sequence shown in SEQ ID NO. 681 as |
| | residues: Thr-33 to Ile-38. |
| 815740 | Preferred epitopes include those comprising a sequence shown in SEQ ID NO. 682 as |
| | residues: Gln-35 to Ser-49. |
| 824865 | Preferred epitopes include those comprising a sequence shown in SEQ ID NO. 684 as |
| | residues: Arg-1 to Gln-13, Arg-33 to Arg-43, Lys-125 to Tyr-130, Ser-166 to Ser-171, |
| | Leu-212 to His-220. |
| 825138 | Preferred epitopes include those comprising a sequence shown in SEQ ID NO. 685 as |
| | residues: Gln-15 to Asn-31. |
| 825535 | Preferred epitopes include those comprising a sequence shown in SEQ ID NO. 686 as |
| | residues: His-6 to Asn-11, Asp-74 to Ala-83, Asp-95 to Leu-101, Leu-108 to Ser-113. |
| 827046 | Preferred epitopes include those comprising a sequence shown in SEQ ID NO. 688 as |
| | residues: His-28 to Asn-33. |
| 827168 | Preferred epitopes include those comprising a sequence shown in SEQ ID NO. 689 as |
| | residues: Met-4 to Lys-11, Pro-37 to Gly-44, Arg-136 to Gly-145, Pro-171 to Gly-181. |
| 827195 | Preferred epitopes include those comprising a sequence shown in SEQ ID NO. 690 as |
| | residues: Ser-1 to Gly-24. |
| 827249 | Preferred epitopes include those comprising a sequence shown in SEQ ID NO. 691 as |
| | residues: Leu-27 to Arg-32, Leu-81 to Pro-86, Pro-91 to Cys-111, His-122 to Asn-132, |
| | Pro-142 to Ile-148, Asp-156 to Gln-164, Gly-185 to Ser-190, Cys-203 to Gly-212, His- |
| | 219 to Ser-230, Val-249 to Phe-255, Glu-276 to Ala-281, Pro-324 to Ser-331, Thr-341 to |
| | Val-346, Ala-370 to Gly-375. |
| 827447 | Preferred epitopes include those comprising a sequence shown in SEQ ID NO. 692 as |
| | residues: Leu-1 to Asp-15, Glu-48 to Lys-61, Thr-84 to Ile-92, Glu-108 to Glu-125, Lys- |
| | 157 to Gln-164, Thr-166 to Glu-173. |
| 827515 | Preferred epitopes include those comprising a sequence shown in SEQ ID NO. 693 as |
| | residues: His-3 to Ile-11, Pro-14 to Asp-22. |
| 827621 | Preferred epitopes include those comprising a sequence shown in SEQ ID NO. 694 as |
| | residues: Gly-1 to His-7, Tyr-53 to Asn-60, Thr-80 to Gly-87, Lys-95 to Gly-102, Pro- |
| | 129 to Thr-134. |
| 827883 | Preferred epitopes include those comprising a sequence shown in SEQ ID NO. 695 as |
| | residues: Gly-1 to Thr-13, Ser-69 to Trp-78, Cys-94 to Tyr-99. |
| 828040 | Preferred epitopes include those comprising a sequence shown in SEQ ID NO. 696 as |
| | residues: Gly-1 to Gln-10, Asn-18 to Lys-25, Gln-35 to Gly-40. |
| 828360 | Preferred epitopes include those comprising a sequence shown in SEQ ID NO. 697 as |
| | residues: Ser-11 to Ile-17, Asn-43 to Pro-48, Ser-64 to Trp-70. |
| 828506 | Preferred epitopes include those comprising a sequence shown in SEQ ID NO. 698 as |
| | residues: Pro-3 to His-8, Arg-24 to Leu-38. |
| 828898 | Preferred epitopes include those comprising a sequence shown in SEQ ID NO. 700 as |
| | residues: Gly-62 to Asn-77, Trp-118 to Glu-123, Asn-165 to Lys-172, Thr-225 to Asn- |
| | 243, Phe-261 to Pro-267, Lys-300 to Trp-310, Asn-370 to Met-375. |
| 828959 | Preferred epitopes include those comprising a sequence shown in SEQ ID NO. 701 as |
| | residues: Lys-20 to Trp-26, Arg-41 to Gly-46. |
| 829081 | Preferred epitopes include those comprising a sequence shown in SEQ ID NO. 702 as |
| | residues: Lys-178 to Gly-184, Ile-186 to Asp-192, Pro-225 to Thr-234. |
| 830069 | Preferred epitopes include those comprising a sequence shown in SEQ ID NO. 703 as |
| | residues: Lys-20 to Asn-26, Lys-37 to Met-42, Cys-51 to Ser-57, Pro-59 to Cys-64, Gln- |
| | 80 to Gly-87, Gln-98 to Glu-121, Phe-144 to Ser-149, Lys-158 to Val-169, Ser-171 to |
| | Pro-177, Lys-185 to Val-190, Glu-193 to Ser-201, Leu-209 to Gly-216, Cys-218 to Thr- |
| | 224. |
| 830109 | Preferred epitopes include those comprising a sequence shown in SEQ ID NO. 704 as |
| | residues: Ser-1 to Gly-9. |
| 830176 | Preferred epitopes include those comprising a sequence shown in SEQ ID NO. 705 as |
| | residues: Gly-66 to Arg-74, Pro-87 to Arg-95, Glu-141 to Leu-149, Gln-225 to Ser-230, |
| | Pro-249 to Ile-256, Pro-351 to Gly-357. |
| 830241 | Preferred epitopes include those comprising a sequence shown in SEQ ID NO. 706 as |
| | residues: Pro-7 to Pro-17, Leu-20 to Gly-26, Leu-48 to Val-54, Pro-65 to Asn-70, Glu- |
| | 90 to Ala-95, Ala-102 to Gln-116, Glu-122 to Leu-137, Val-183 to Leu-192, Ala-235 to |
| | Ile-256, Gly-264 to Asp-270, Phe-282 to Ile-288, Arg-309 to Ala-314, Asn-330 to Asp- |
| | 336, Ala-338 to Asp-344, Lys-358 to Lys-367. |
| 830402 | Preferred epitopes include those comprising a sequence shown in SEQ ID NO. 708 as |
| | residues: Gln-8 to Ser-15, His-57 to Ser-64. |
| 830414 | Preferred epitopes include those comprising a sequence shown in SEQ ID NO. 709 as |
| | residues: Gly-1 to Arg-12, Ser-87 to Tyr-95, Arg-149 to Glu-155, Tyr-190 to Asp-195, |
| | Pro-265 to Leu-272, Ser-291 to Gly-305. |
| 830444 | Preferred epitopes include those comprising a sequence shown in SEQ ID NO. 710 as |
| | residues: Ser-47 to Tyr-54. |
| 830476 | Preferred epitopes include those comprising a sequence shown in SEQ ID NO. 711 as |
| | residues: Arg-5 to Leu-18, Thr-21 to Leu-29, Ile-32 to Ala-39, Glu-48 to Arg-56, Gln-62 |
| | to Trp-68, Glu-71 to Gly-78. |
| 830624 | Preferred epitopes include those comprising a sequence shown in SEQ ID NO. 712 as |
| | residues: Ala-21 to Pro-26, Arg-37 to Phe-44, Thr-67 to Lys-75, Ser-81 to Ser-86, Val- |
| | 116 to Gln-127, Gly-192 to Thr-197, Trp-201 to Asn-207, Glu-243 to Ile-252, Lys-267 to |
| | Pro-273, Pro-292 to Phe-300, Lys-303 to Ala-314, Phe-344 to Asp-360, Ser-379 to Gly- |
| | 386, Phe-389 to Asn-396, Glu-405 to Lys-413. |
| 830643 | Preferred epitopes include those comprising a sequence shown in SEQ ID NO. 713 as |
| | residues: Gly-10 to Gly-15, Val-59 to Lys-64, Lys-131 to Gly-140, Ala-220 to Asn-230, |
| | Gly-313 to Arg-321, His-331 to Thr-336, Pro-352 to Gly-359, Thr-361 to Cys-370. |
| 830714 | Preferred epitopes include those comprising a sequence shown in SEQ ID NO. 714 as |
| | residues: Glu-17 to Thr-24. |
| 830826 | Preferred epitopes include those comprising a sequence shown in SEQ ID NO. 715 as |
| | residues: Glu-14 to Ala-19, Arg-21 to Glu-28. |
| 830888 | Preferred epitopes include those comprising a sequence shown in SEQ ID NO. 716 as |
| | residues: Lys-63 to Asn-72, Arg-87 to Gly-92, Pro-125 to Gln-130. |
| 830984 | Preferred epitopes include those comprising a sequence shown in SEQ ID NO. 717 as |
| | residues: Thr-1 to Thr-10, Gly-29 to Gly-35, Leu-42 to Asp-64, Asp-71 to Ser-99, Gly- |
| | 112 to Asp-132, Ser-178 to Ala-184. |
| 831015 | Preferred epitopes include those comprising a sequence shown in SEQ ID NO. 718 as |
| | residues: Gln-47 to Cys-53, Asn-66 to Cys-71, Arg-127 to Ala-141, Arg-143 to Lys-169, |
| | Lys-174 to Tyr-179. |
| 831080 | Preferred epitopes include those comprising a sequence shown in SEQ ID NO. 719 as |
| | residues: Tyr-10 to Asp-22, Pro-40 to Met-49. |
| 831101 | Preferred epitopes include those comprising a sequence shown in SEQ ID NO. 720 as |
| | residues: Asp-1 to Pro-10, Pro-39 to Trp-57, Ser-60 to Gly-68, Glu-105 to Pro-113, Thr- |
| | 118 to Lys-124, Phe-131 to Tyr-139, Arg-153 to Lys-162, Lys-189 to Arg-194, Ala-230 |
| | to Ala-236, Trp-259 to Gln-266, Ala-272 to Tyr-277. |
| 831146 | Preferred epitopes include those comprising a sequence shown in SEQ ID NO. 721 as |
| | residues: Leu-23 to Asp-31, Gln-46 to Ile-69, Ile-120 to Lys-128, Pro-148 to Asp-154, |
| | Pro-216 to Val-223, Asn-261 to Ala-273. |
| 831215 | Preferred epitopes include those comprising a sequence shown in SEQ ID NO. 722 as |
| | residues: Gln-27 to Glu-52, Pro-92 to Pro-99, Asp-109 to Asp-116, Gln-123 to Ala-131, |
| | Leu-159 to His-164, Glu-176 to Val-183, Arg-195 to Glu-200, Gln-210 to Tyr-215, Glu- |
| | 244 to Arg-255, Thr-262 to Asp-267, Pro-286 to Trp-292, Arg-302 to Asn-309, Gln-318 |
| | to Ser-323, Gln-341 to Ile-348, Lys-361 to Ile-374, Leu-378 to Gln-394. |
| 831231 | Preferred epitopes include those comprising a sequence shown in SEQ ID NO. 723 as |
| | residues: Lys-1 to Val-8, Ser-133 to Arg-139, Arg-163 to Leu-171, Arg-307 to Gln-320, |
| | Val-330 to Gly-335. |
| 831242 | Preferred epitopes include those comprising a sequence shown in SEQ ID NO. 724 as |
| | residues: Asn-55 to Pro-63, Arg-132 to Tyr-139, Phe-174 to Lys-183. |
| 831291 | Preferred epitopes include those comprising a sequence shown in SEQ ID NO. 727 as |
| | residues: Gly-1 to Gln-9, Asn-11 to Arg-16, Cys-28 to His-33, Pro-51 to Pro-57, Glu-66 |
| | to Glu-72, Pro-84 to Asp-89, Pro-104 to Asp-109, Glu-122 to Thr-132. |
| 831382 | Preferred epitopes include those comprising a sequence shown in SEQ ID NO. 728 as |
| | residues: Pro-13 to Pro-20, Thr-44 to His-49, Ala-72 to Phe-78. |
| 831624 | Preferred epitopes include those comprising a sequence shown in SEQ ID NO. 729 as |
| | residues: Ser-37 to Asp-43, Lys-266 to Ser-272, Glu-304 to Thr-318, Leu-345 to Ser- |
| | 359, Gln-423 to Ala-439. |
| 831640 | Preferred epitopes include those comprising a sequence shown in SEQ ID NO. 730 as |
| | residues: Cys-16 to Ser-23. |
| 831688 | Preferred epitopes include those comprising a sequence shown in SEQ ID NO. 731 as |
| | residues: Pro-16 to Asp-23, Arg-48 to Glu-55, Gly-107 to Val-112, Glu-133 to Leu-140, |
| | Asn-163 to Gly-169, Gly-191 to Lys-196. |
| 831690 | Preferred epitopes include those comprising a sequence shown in SEQ ID NO. 732 as |
| | residues: Pro-36 to Trp-51, Arg-96 to Gly-104, Glu-134 to Asn-144, Pro-203 to His-210 |
| | Cys-228 to Asp-235, Gly-278 to Tyr-284, Ser-309 to Pro-316, Thr-325 to Ala-333, Ser- |
| | 337 to Glu-357, Tyr-390 to Gly-403, Tyr-409 to Gly-421. |
| 831718 | Preferred epitopes include those comprising a sequence shown in SEQ ID NO. 733 as |
| | residues: Leu-64 to Arg-71, Leu-99 to Ser-105. |
| 831832 | Preferred epitopes include those comprising a sequence shown in SEQ ID NO. 734 as |
| | residues: Thr-8 to Ser-16. |
| 831907 | Preferred epitopes include those comprising a sequence shown in SEQ ID NO. 735 as |
| | residues: Leu-15 to Ser-20. |
| 831938 | Preferred epitopes include those comprising a sequence shown in SEQ ID NO. 736 as |
| | residues: Gly-74 to Val-79, Ser-94 to Arg-106, Asp-157 to Lys-162, Pro-354 to Gln- |
| | 364, Arg-371 to Arg-385. |
| 831954 | Preferred epitopes include those comprising a sequence shown in SEQ ID NO. 737 as |
| | residues: Thr-48 to Ser-58, Gly-112 to Pro-129, Ala-156 to Ser-167. |
| 832028 | Preferred epitopes include those comprising a sequence shown in SEQ ID NO. 738 as |
| | residues: Lys-1 to Asn-14, Pro-103 to Tyr-111. |
| 832043 | Preferred epitopes include those comprising a sequence shown in SEQ ID NO. 739 as |
| | residues: Arg-9 to Val-17, Phe-110 to Lys-130, Gly-138 to Ala-143. |
| 832055 | Preferred epitopes include those comprising a sequence shown in SEQ ID NO. 740 as |
| | residues: Asp-1 to Lys-11, Ser-22 to Arg-32. |
| 832124 | Preferred epitopes include those comprising a sequence shown in SEQ ID NO. 741 as |
| | residues: Pro-10 to His-17, Thr-41 to Ala-51, Ser-60 to Pro-67, Leu-70 to Lys-78, Pro- |
| | 95 to Ser-102, Ala-114 to Pro-122, Ile-125 to Pro-132, Glu-165 to Trp-172, Arg-194 to |
| | Gln-209. |
| 832145 | Preferred epitopes include those comprising a sequence shown in SEQ ID NO. 742 as |
| | residues: His-1 to Gln-7, Leu-11 to Glu-22, Gly-43 to Cys-52. |
| 832254 | Preferred epitopes include those comprising a sequence shown in SEQ ID NO. 743 as |
| | residues: Pro-1 to Ala-32, Phe-53 to Asp-59. |
| 832331 | Preferred epitopes include those comprising a sequence shown in SEQ ID NO. 744 as |
| | residues: Ser-6 to Asn-67, Gly-69 to Gly-98, Ser-100 to Phe-128. |
| 832401 | Preferred epitopes include those comprising a sequence shown in SEQ ID NO. 746 as |
| | residues: Gln-1 to Gly-6, Thr-9 to Asp-20, Met-22 to Asp-33, Pro-62 to Gly-70, Pro-79 |
| | to Lys-85, Asn-99 to Ser-104, Arg-154 to Glu-164. |
| 832492 | Preferred epitopes include those comprising a sequence shown in SEQ ID NO. 749 as |
| | residues: Cys-1 to Gly-6, Glu-27 to Leu-33, Lys-58 to Tyr-63, Glu-65 to Thr-79, Leu-83 |
| | to Lys-92. |
| 832598 | Preferred epitopes include those comprising a sequence shown in SEQ ID NO. 750 as |
| | residues: Ser-65 to Arg-79, Asn-81 to Leu-90, Ser-123 to Gly-135. |
| 834510 | Preferred epitopes include those comprising a sequence shown in SEQ ID NO. 752 as |
| | residues: Arg-83 to Lys-90, Arg-189 to Ser-195, Ser-197 to His-203. |
| 835139 | Preferred epitopes include those comprising a sequence shown in SEQ ID NO. 753 as |
| | residues: Ala-40 to Asn-49, Glu-76 to Ser-83, Cys-102 to Thr-113, Pro-143 to Thr-152, |
| | Gly-160 to Thr-177, Cys-204 to His-212. |
| 835142 | Preferred epitopes include those comprising a sequence shown in SEQ ID NO. 754 as |
| | residues: Pro-1 to Pro-6, Val-14 to Val-23, Tyr-124 to Lys-132, Gln-141 to Tyr-148, |
| | Glu-215 to Pro-221. |
| 835271 | Preferred epitopes include those comprising a sequence shown in SEQ ID NO. 755 as |
| | residues: Pro-1 to Pro-8, Asp-66 to Asn-78, Pro-81 to Ser-95, Thr-111 to Tyr-118, Asp- |
| | 183 to Asn-188, Asp-190 to Asp-195, Cys-224 to Ile-232. |
| 835369 | Preferred epitopes include those comprising a sequence shown in SEQ ID NO. 756 as |
| | residues: Phe-65 to His-81, Thr-102 to Asp-117. |
| 835430 | Preferred epitopes include those comprising a sequence shown in SEQ ID NO. 757 as |
| | residues: Gln-48 to Lys-64, Glu-175 to Thr-183. |
| 835462 | Preferred epitopes include those comprising a sequence shown in SEQ ID NO. 758 as |
| | residues: Gly-8 to Gly-28, Glu-113 to Asn-122, Arg-144 to Gly-214, Ala-218 to Gly- |
| | 232, Arg-243 to Glu-248. |
| 835539 | Preferred epitopes include those comprising a sequence shown in SEQ ID NO. 759 as |
| | residues: His-33 to Leu-39, Gly-49 to Glu-58, Ser-112 to Val-146. |
| 835635 | Preferred epitopes include those comprising a sequence shown in SEQ ID NO. 760 as |
| | residues: Leu-11 to Gly-47, Trp-61 to Ile-68, Glu-96 to Lys-103, Gly-110 to Gln-119, |
| | Ser-126 to Glu-160, Leu-172 to Ser-180, Thr-188 to Lys-193, Ser-197 to His-205, Gln- |
| | 215 to Lys-227, Cys-299 to Asn-309, Lys-353 to Tyr-363, Trp-412 to Asp-418, Leu-448 |
| | to Leu-458, Gln-495 to Ser-503, Ser-587 to Thr-596, Ser-615 to Phe-620, Thr-653 to |
| | Asp-658, Glu-666 to Glu-671, Lys-710 to Gln-716. |
| 836161 | Preferred epitopes include those comprising a sequence shown in SEQ ID NO. 762 as |
| | residues: Ser-63 to Lys-71. |
| 836213 | Preferred epitopes include those comprising a sequence shown in SEQ ID NO. 763 as |
| | residues: Glu-9 to Gly-17. |
| 836371 | Preferred epitopes include those comprising a sequence shown in SEQ ID NO. 764 as |
| | residues: Ser-11 to Ser-31, Thr-39 to Trp-45, Ser-61 to Tyr-67, Asp-93 to Gln-100, Arg- |
| | 124 to Asn-138, Val-141 to Asp-150. |
| 837181 | Preferred epitopes include those comprising a sequence shown in SEQ ID NO. 767 as |
| | residues: Ala-15 to Asp-34, Met-43 to Ser-48, Gln-80 to Glu-94, Glu-129 to Ser-135, |
| | Asp-139 to Ala-144, Glu-172 to Gln-179, Glu-266 to Ala-273. |
| 837337 | Preferred epitopes include those comprising a sequence shown in SEQ ID NO. 769 as |
| | residues: Tyr-29 to Asn-37. |
| 837551 | Preferred epitopes include those comprising a sequence shown in SEQ ID NO. 771 as |
| | residues: Arg-1 to Gly-7, Pro-9 to Ala-19. |
| 837622 | Preferred epitopes include those comprising a sequence shown in SEQ ID NO. 772 as |
| | residues: Gly-5 to Asp-26, Glu-62 to Phe-69. |
| 839949 | Preferred epitopes include those comprising a sequence shown in SEQ ID NO. 774 as |
| | residues: Ala-6 to Ser-16, Ser-36 to Gln-48, Pro-57 to Tyr-65, Glu-80 to Asn-87, Tyr- |
| | 148 to Phe-153, Pro-177 to Asn-182, Ser-221 to Ser-229, Cys-252 to Asp-265, Tyr-386 |
| | to Tyr-393, Leu-427 to Trp-438, Leu-487 to Tyr-492. |
| 840000 | Preferred epitopes include those comprising a sequence shown in SEQ ID NO. 775 as |
| | residues: Gly-5 to Ser-21, Glu-30 to Glu-37, Glu-49 to Lys-57, Pro-92 to Arg-98, Leu- |
| | 110 to Pro-118, Pro-223 to Pro-230, Ala-236 to Arg-241, Ser-285 to Gln-299, Leu-369 to |
| | Tyr-374. |
| 840095 | Preferred epitopes include those comprising a sequence shown in SEQ ID NO. 776 as |
| | residues: Pro-7 to Thr-13, Arg-25 to His-31, Gly-34 to His-40, Gln-127 to Asn-132, |
| | Asp-208 to Trp-214, Ser-243 to Phe-249, Glu-255 to Asp-261. |
| 840166 | Preferred epitopes include those comprising a sequence shown in SEQ ID NO. 777 as |
| | residues: Pro-1 to Ser-9. |
| 840613 | Preferred epitopes include those comprising a sequence shown in SEQ ID NO. 780 as |
| | residues: Pro-7 to Gly-14, Gln-31 to Tyr-37, Ile-87 to Ser-92, Gln-172 to Lys-184, Phe- |
| | 197 to Asp-207, Leu-211 to Gln-225, Gln-297 to Lys-306, Glu-308 to Gly-318, Glu-420 |
| | to Gly-425, Arg-437 to Ala-447, Thr-507 to Asn-512, Ser-536 to Arg-541, Ser-634 to |
| | Gly-640, Lys-649 to Gln-656, Glu-661 to Leu-668, Tyr-709 to Gly-723, Gly-761 to Ala- |
| | 767. |
| 840699 | Preferred epitopes include those comprising a sequence shown in SEQ ID NO. 781 as |
| | residues: Pro-20 to Gly-26, Pro-75 to Gly-80, Lys-92 to Thr-98, Thr-230 to Pro-239, |
| | His-249 to Met-254, Asp-304 to Arg-312. |
| 840752 | Preferred epitopes include those comprising a sequence shown in SEQ ID NO. 782 as |
| | residues: Val-25 to Ser-33. |
| 840755 | Preferred epitopes include those comprising a sequence shown in SEQ ID NO. 783 as |
| | residues: Pro-18 to Lys-25, Arg-28 to Cys-38, Val-61 to Leu-67, Pro-84 to Ser-95, Thr- |
| | 174 to Gly-180, Thr-191 to Asn-197, Asp-205 to Pro-212, Lys-253 to Val-258, Lys-290 |
| | to Gly-297, Leu-299 to Cys-310. |
| 841066 | Preferred epitopes include those comprising a sequence shown in SEQ ID NO. 785 as |
| | residues: Gly-1 to Gly-21, Lys-38 to Thr-49, Leu-57 to Asp-62, Gln-74 to Phe-83, Gly- |
| | 96 to Cys-109, Asn-124 to Gln-130, Glu-135 to Cys-140, Asp-149 to Lys-154, Tyr-164 |
| | to Asp-169, Pro-184 to Lys-192, Arg-209 to Ser-216, Asp-243 to Glu-250, Pro-329 to |
| | Glu-337, Thr-462 to Cys-471, Asn-481 to Thr-506. |
| 841306 | Preferred epitopes include those comprising a sequence shown in SEQ ID NO. 786 as |
| | residues: Arg-8 to Val-20, Glu-22 to Val-40, Glu-68 to Tyr-77, Lys-88 to Asp-95, Thr- |
| | 116 to Lys-121. |
| 842025 | Preferred epitopes include those comprising a sequence shown in SEQ ID NO. 788 as |
| | residues: Glu-66 to Leu-74, Ile-116 to Glu-121, His-124 to Asp-129, Asn-152 to Tyr- |
| | 157, Pro-171 to Asn-177, Glu-190 to Asn-201, Ile-215 to Gln-224, Lys-360 to Lys-370, |
| | Arg-389 to Asp-395, Glu-401 to Gly-415, Pro-431 to Cys-437. |
| 842178 | Preferred epitopes include those comprising a sequence shown in SEQ ID NO. 789 as |
| | residues: His-4 to Arg-9, His-16 to Gly-23. |
| 842438 | Preferred epitopes include those comprising a sequence shown in SEQ ID NO. 790 as |
| | residues: Ala-24 to Ser-32. |
| 843289 | Preferred epitopes include those comprising a sequence shown in SEQ ID NO. 791 as |
| | residues His-55 to Arg-63, Glu-96 to Val-109, Ser-113 to Ala-119, Lys-140 to Tyr-150, |
| | Glu-157 to Ser-172, Gly-174 to Asn-185, Arg-223 to Pro-245, Leu-264 to Asp-272. |
| 843447 | Preferred epitopes include those comprising a sequence shown in SEQ ID NO. 792 as |
| | residues: Tyr-55 to Lys-64, Asp-80 to Trp-85. |
| 843743 | Preferred epitopes include those comprising a sequence shown in SEQ ID NO. 793 as |
| | residues: Pro-56 to Gly-63, Pro-70 to Asn-75, Gly-119 to Val-126, Trp-130 to Gly-137, |
| | Gln-210 to Glu-220, Lys-230 to Thr-236, Tyr-246 to Val-253. |
| 843878 | Preferred epitopes include those comprising a sequence shown in SEQ ID NO. 794 as |
| | residues: Thr-83 to Gly-88, Arg-144 to Pro-155, Arg-208 to Lys-215, Arg-286 to Gly-295. |
| 844071 | Preferred epitopes include those comprising a sequence shown in SEQ ID NO. 796 as |
| | residues: Thr-9 to Glu-15, Pro-20 to Gly-25, Arg-43 to Val-48, Pro-79 to Ala-91, Trp- |
| | 114 to Glu-123, His-167 to Lys-177, Pro-179 to Arg-192, Asp-202 to Leu-208, Ala-261 |
| | to Asn-286, Gly-288 to Gly-296, Gly-301 to Met-308, Ser-343 to Asn-365, Phe-368 to |
| | Asn-379, Met-406 to Trp-413. |
| 844444 | Preferred epitopes include those comprising a sequence shown in SEQ ID NO. 797 as |
| | residues: Arg-9 to Thr-15, Pro-44 to His-50, Glu-62 to Arg-87, Glu-120 to Arg-126, |
| | Gln-144 to Asn-152, Ser-157 to Pro-169. |
| 844561 | Preferred epitopes include those comprising a sequence shown in SEQ ID NO. 798 as |
| | residues: Arg-30 to Ala-36, Gln-45 to Met-51. |
| 844953 | Preferred epitopes include those comprising a sequence shown in SEQ ID NO. 799 as |
| | residues: His-14 to Leu-25, Lys-104 to Ala-113. |
| 844990 | Preferred epitopes include those comprising a sequence shown in SEQ ID NO. 800 as |
| | residues: Ile-4 to Ala-15, Pro-39 to Gln-49, Lys-67 to Ser-72, Arg-87 to Leu-101, Thr- |
| | 135 to Ser-146, Thr-177 to Val-183, Ser-185 to Ser-192, Ser-198 to Ala-216, Ser-221 to |
| | Pro-227, Val-242 to Gln-254, Ser-258 to Thr-266, Asn-274 to Arg-324. |
| 845829 | Preferred epitopes include those comprising a sequence shown in SEQ ID NO. 802 as |
| | residues: Asp-14 to Gly-29, Gln-88 to Asp-93, Glu-191 to Thr-196, Gly-262 to Ile-269. |
| HTAIR72R | Preferred epitopes include those comprising a sequence shown in SEQ ID NO. 803 as |
| | residues: Arg-4 to Leu-11, Cys-18 to His-25. |
| HAPRM14R | Preferred epitopes include those comprising a sequence shown in SEQ ID NO. 805 as |
| | residues: Leu-16 to Ser-22, Lys-24 to Glu-38. |
| HMWEI22R | Preferred epitopes include those comprising a sequence shown in SEQ ID NO. 806 as |
| | residues: Glu-1 to Thr-11, Pro-37 to Lys-42. |
| HMCGG09R | Preferred epitopes include those comprising a sequence shown in SEQ ID NO. 812 as |
| | residues: Ser-2 to Ser-12, Gln-54 to His-61. |
| HFPDJ19R | Preferred epitopes include those comprising a sequence shown in SEQ ID NO. 814 as |
| | residues: Ile-118 to Lys-124. |
| HBGOI21R | Preferred epitopes include those comprising a sequence shown in SEQ ID NO. 816 as |
| | residues: Asn-2 to Pro-9, Pro-17 to Leu-23, Asp-40 to Arg-61, Ala-90 to Ser-95, Ile-102 |
| | to Phe-108. |
| HCLCW23R | Preferred epitopes include those comprising a sequence shown in SEQ ID NO. 817 as |
| | residues: Pro-1 to Trp-7, Pro-40 to Pro-45. |
| H2CAC11R | Preferred epitopes include those comprising a sequence shown in SEQ ID NO. 819 as |
| | residues: Lys-7 to Thr-13, Asp-24 to Thr-30. |
| HOEMQ09R | Preferred epitopes include those comprising a sequence shown in SEQ ID NO. 821 as |
| | residues: Thr-1 to Thr-6, Arg-13 to Ser-18. |
| HTLHA89R | Preferred epitopes include those comprising a sequence shown in SEQ ID NO. 825 as |
| | residues: Ser-1 to Asp-10, Ile-20 to Asp-26. |
| HWAFE43R | Preferred epitopes include those comprising a sequence shown in SEQ ID NO. 827 as |
| | residues: Pro-9 to Lys-16. |
| HTLIW74R | Preferred epitopes include those comprising a sequence shown in SEQ ID NO. 829 as |
| | residues: Glu-67 to Gln-76, Lys-131 to Asp-136. |
| HDPTT19R | Preferred epitopes include those comprising a sequence shown in SEQ ID NO. 831 as |
| | residues: Asn-1 to Ser-8, His-37 to Pro-45. |
| HKBAC11R | Preferred epitopes include those comprising a sequence shown in SEQ ID NO. 832 as |
| | residues: Gln-18 to Glu-23, Arg-43 to Arg-58. |
| HBGOU32R | Preferred epitopes include those comprising a sequence shown in SEQ ID NO. 833 as |
| | residues: Arg-67 to Glu-74. |
| HNTNC82R | Preferred epitopes include those comprising a sequence shown in SEQ ID NO. 834 as |
| | residues: Met-56 to Val-61, Pro-74 to Gly-91, Gly-112 to Pro-117. |
| HMCIB16R | Preferred epitopes include those comprising a sequence shown in SEQ ID NO. 835 as |
| | residues: Gln-26 to Glu-37, Arg-42 to Gln-50, Ser-59 to Leu-74. |
| HAPNX90R | Preferred epitopes include those comprising a sequence shown in SEQ ID NO. 836 as |
| | residues: Gly-1 to His-13. |
| HAJBZ28R | Preferred epitopes include those comprising a sequence shown in SEQ ID NO. 838 as |
| | residues: Leu-8 to Gly-13, Glu-73 to Glu-81, Asn-88 to Arg-94. |
| HAGGW13 | Preferred epitopes include those comprising a sequence shown in SEQ ID NO. 839 as |
| R | residues: Pro-1 to Asp-10, Met-39 to Gly-45. |
| HAHDV81R | Preferred epitopes include those comprising a sequence shown in SEQ ID NO. 840 as |
| | residues: Lys-2 to Arg-12. |
| HACBP41R | Preferred epitopes include those comprising a sequence shown in SEQ ID NO. 841 as |
| | residues: Gly-1 to Phe-7, Arg-23 to Ser-29, Ser-34 to Ala-39, Lys-50 to Ile-56. |
| HESAN74R | Preferred epitopes include those comprising a sequence shown in SEQ ID NO. 843 as |
| | residues: Gly-1 to Thr-9, Phe-28 to Lys-43. |
| HAPNU02R | Preferred epitopes include those comprising a sequence shown in SEQ ID NO. 845 as |
| | residues: Pro-59 to Gly-75, Pro-84 to Gly-91, Cys-102 to Pro-114. |
| HOUGB18R | Preferred epitopes include those comprising a sequence shown in SEQ ID NO. 846 as |
| | residues: Lys-7 to Thr-13, Ser-25 to Thr-30. |
| HBAGQ35R | Preferred epitopes include those comprising a sequence shown in SEQ ID NO. 847 as |
| | residues: Leu-25 to Glu-32, Pro-42 to Gly-47, Cys-61 to Gly-68. |
| HAPQM68R | Preferred epitopes include those comprising a sequence shown in SEQ ID NO. 849 as |
| | residues: Thr-44 to Lys-56, Arg-93 to Pro-99, Ser-104 to Pro-112. |
| HDPQN35R | Preferred epitopes include those comprising a sequence shown in SEQ ID NO. 851 as |
| | residues: Pro-1 to Pro-6, Glu-31 to Asp-40. |
| HAPNU41R | Preferred epitopes include those comprising a sequence shown in SEQ ID NO. 852 as |
| | residues: Glu-13 to Val-18. |
| HSYCT58R | Preferred epitopes include those comprising a sequence shown in SEQ ID NO. 853 as |
| | residues: Arg-5 to Gly-14, Leu-34 to Arg-40, Leu-42 to Ala-49. |
| HFKLT54R | Preferred epitopes include those comprising a sequence shown in SEQ ID NO. 854 as |
| | residues: Gln-51 to Tyr-58. |
| HTXNT90R | Preferred epitopes include those comprising a sequence shown in SEQ ID NO. 855 as |
| | residues: Phe-121 to Asp-126. |
| H6BSD14R | Preferred epitopes include those comprising a sequence shown in SEQ ID NO. 856 as |
| | residues: Glu-6 to Glu-21. |
| HAPAK90R | Preferred epitopes include those comprising a sequence shown in SEQ ID NO. 862 as |
| | residues: Glu-20 to Gly-26. |
| HAPBV57R | Preferred epitopes include those comprising a sequence shown in SEQ ID NO. 865 as |
| | residues: Thr-8 to Leu-13. |
| HAPQO76R | Preferred epitopes include those comprising a sequence shown in SEQ ID NO. 867 as |
| | residues: Pro-10 to Thr-25, Pro-46 to Leu-55. |
| HBKDI63R | Preferred epitopes include those comprising a sequence shown in SEQ ID NO. 869 as |
| | residues: Glu-8 to Asn-13, Arg-16 to Thr-29. |
| HCLCX30R | Preferred epitopes include those comprising a sequence shown in SEQ ID NO. 871 as |
| | residues: Pro-47 to Trp-53, Ser-56 to Ser-66. |
| HDTFW96R | Preferred epitopes include those comprising a sequence shown in SEQ ID NO. 873 as |
| | residues: Ser-41 to Lys-48. |
| HDTLW91R | Preferred epitopes include those comprising a sequence shown in SEQ ID NO. 874 as |
| | residues: Trp-12 to Ser-17. |
| HE9GW86R | Preferred epitopes include those comprising a sequence shown in SEQ ID NO. 875 as |
| | residues: Pro-52 to Glu-59. |
| HFACI43R | Preferred epitopes include those comprising a sequence shown in SEQ ID NO. 876 as |
| | residues: Asn-4 to Glu-37. |
| HHFLJ48R | Preferred epitopes include those comprising a sequence shown in SEQ ID NO. 878 as |
| | residues: Arg-1 to Arg-6, Gly-26 to Ala-55. |
| HOEKC43R | Preferred epitopes include those comprising a sequence shown in SEQ ID NO. 882 as |
| | residues: Ala-1 to Ser-12, Thr-21 to Arg-31. |
| HPJCZ62R | Preferred epitopes include those comprising a sequence shown in SEQ ID NO. 883 as |
| | residues: Lys-1 to Lys-12, Ala-16 to Ala-22, Gly-31 to Lys-36. |
| HSXEN17R | Preferred epitopes include those comprising a sequence shown in SEQ ID NO. 885 as |
| | residues: Glu-1 to His-6, Gly-19 to Trp-31. |
| HMCGG17R | Preferred epitopes include those comprising a sequence shown in SEQ ID NO. 886 as |
| | residues: Val-22 to Ser-28, Arg-62 to Ile-69. |

[0110] The present invention encompasses polypeptides comprising, or alternatively consisting of, an epitope of the polypeptide sequence shown in SEQ ID NO:Y, or an epitope of the polypeptide sequence encoded by the cDNA in the related cDNA clone contained in a deposited library or encoded by a polynucleotide that hybridizes to the complement of an epitope encoding sequence of SEQ ID NO:X, or an epitope encoding sequence contained in the deposited cDNA clone under stringent hybridization conditions, or alternatively, under lower stringency hybridization conditions, as defined supra. The present invention further encompasses polynucleotide sequences encoding an epitope of a polypeptide sequence of the invention (such as, for example, the sequence disclosed in SEQ ID NO:X), polynucleotide sequences of the complementary strand of a polynucleotide sequence encoding an epitope of the invention, and polynucleotide sequences which hybridize to this complementary strand under stringent hybridization conditions or alternatively, under lower stringency hybridization conditions, as defined supra.

[0111] The term “epitopes,” as used herein, refers to portions of a polypeptide having antigenic or immunogenic activity in an animal, preferably a mammal, and most preferably in a human. In a preferred embodiment, the present invention encompasses a polypeptide comprising an epitope, as well as the polynucleotide encoding this polypeptide. An “immunogenic epitope,” as used herein, is defined as a portion of a protein that elicits an antibody response in an animal, as determined by any method known in the art, for example, by the methods for generating antibodies described infra. (See, for example, Geysen et al., Proc. Natl. Acad. Sci. USA 81:3998-4002 (1983)). The term “antigenic epitope,” as used herein, is defined as a portion of a protein to which an antibody can immunospecifically bind its antigen as determined by any method well known in the art, for example, by the immunoassays described herein. Immunospecific binding excludes non-specific binding but does not necessarily exclude cross- reactivity with other antigens. Antigenic epitopes need not necessarily be immunogenic.

[0112] Fragments which function as epitopes may be produced by any conventional means. (See, e.g., Houghten, R. A., Proc. Natl. Acad. Sci. USA 82:5131-5135 (1985) further described in U.S. Pat. No. 4,631,211.)

[0113] In the present invention, antigenic epitopes preferably contain a sequence of at least 4, at least 5, at least 6, at least 7, more preferably at least 8, at least 9, at least 10, at least 11, at least 12, at least 13, at least 14, at least 15, at least 20, at least 25, at least 30, at least 40, at least 50, and, most preferably, between about 15 to about 30 amino acids. Preferred polypeptides comprising immunogenic or antigenic epitopes are at least 10, 15, 20, 25, 30, 35, 40, 45, 50, 55, 60, 65, 70, 75, 80, 85, 90, 95, or 100 amino acid residues in length. Additional non-exclusive preferred antigenic epitopes include the antigenic epitopes disclosed herein, as well as portions thereof. Antigenic epitopes are useful, for example, to raise antibodies, including monoclonal antibodies, that specifically bind the epitope. Preferred antigenic epitopes include the antigenic epitopes disclosed herein, as well as any combination of two, three, four, five or more of these antigenic epitopes. Antigenic epitopes can be used as the target molecules in immunoassays. (See, for instance, Wilson et al., Cell 37:767-778 (1984); Sutcliffe et al., Science 219:660-666 (1983)).

[0114] Similarly, immunogenic epitopes can be used, for example, to induce antibodies according to methods well known in the art. (See, for instance, Sutcliffe et al., supra; Wilson et al., supra; Chow et al., Proc. Natl. Acad. Sci. USA 82:910-914; and Bittle et al., J. Gen. Virol. 66:2347-2354 (1985). Preferred immunogenic epitopes include the immunogenic epitopes disclosed herein, as well as any combination of two, three, four, five or more of these immunogenic epitopes. The polypeptides comprising one or more immunogenic epitopes may be presented for eliciting an antibody response together with a carrier protein, such as an albumin, to an animal system (such as rabbit or mouse), or, if the polypeptide is of sufficient length (at least about 25 amino acids), the polypeptide may be presented without a carrier. However, immunogenic epitopes comprising as few as 8 to 10 amino acids have been shown to be sufficient to raise antibodies capable of binding to, at the very least, linear epitopes in a denatured polypeptide (e.g., in Western blotting).

[0115] Epitope-bearing polypeptides of the present invention may be used to induce antibodies according to methods well known in the art including, but not limited to, in vivo immunization, in vitro immunization, and phage display methods. See, e.g., Sutcliffe et al., supra; Wilson et al., supra, and Bittle et al., J. Gen. Virol., 66:2347-2354 (1985). If in vivo immunization is used, animals may be immunized with free peptide; however, anti-peptide antibody titer may be boosted by coupling the peptide to a macromolecular carrier, such as keyhole limpet hemacyanin (KLH) or tetanus toxoid. For instance, peptides containing cysteine residues may be coupled to a carrier using a linker such as maleimidobenzoyl-N-hydroxysuccinimide ester (MBS), while other peptides may be coupled to carriers using a more general linking agent such as glutaraldehyde. Animals such as rabbits, rats and mice are immunized with either free or carrier-coupled peptides, for instance, by intraperitoneal and/or intradermal injection of emulsions containing about 100 μg of peptide or carrier protein and Freund's adjuvant or any other adjuvant known for stimulating an immune response. Several booster injections may be needed, for instance, at intervals of about two weeks, to provide a useful titer of anti-peptide antibody which can be detected, for example, by ELISA assay using free peptide adsorbed to a solid surface. The titer of anti-peptide antibodies in serum from an immunized animal may be increased by selection of anti-peptide antibodies, for instance, by adsorption to the peptide on a solid support and elution of the selected antibodies according to methods well known in the art.

[0116] As one of skill in the art will appreciate, and as discussed above, the polypeptides of the present invention, and immunogenic and/or antigenic epitope fragments thereof can be fused to other polypeptide sequences. For example, the polypeptides of the present invention may be fused with the constant domain of immunoglobulins (IgA, IgE, IgG, IgM), or portions thereof (CH1, CH2, CH3, or any combination thereof and portions thereof) resulting in chimeric polypeptides. Such fusion proteins may facilitate purification and may increase half-life in vivo. This has been shown for chimeric proteins consisting of the first two domains of the human CD4-polypeptide and various domains of the constant regions of the heavy or light chains of mammalian immunoglobulins. See, e.g., EP 394,827; Traunecker et al., Nature, 331:84-86 (1988). Enhanced delivery of an antigen across the epithelial barrier to the immune system has been demonstrated for antigens (e.g., insulin) conjugated to an FcRn binding partner such as IgG or Fc fragments (see, e.g., PCT Publications WO 96/22024 and WO 99/04813). IgG Fusion proteins that have a disulfide-linked dimeric structure due to the IgG portion desulfide bonds have also been found to be more efficient in binding and neutralizing other molecules than monomeric polypeptides or fragments thereof alone. See, e.g., Fountoulakis et al., J. Biochem., 270:3958-3964 (1995).

[0117] Similarly, EP-A-O 464 533 (Canadian counterpart 2045869) discloses fusion proteins comprising various portions of constant region of immunoglobulin molecules together with another human protein or part thereof. In many cases, the Fc part in a fusion protein is beneficial in therapy and diagnosis, and thus can result in, for example, improved pharmacokinetic properties. (EP-A 0232 262.) Alternatively, deleting the Fc part after the fusion protein has been expressed, detected, and purified, may be desired. For example, the Fc portion may hinder therapy and diagnosis if the fusion protein is used as an antigen for immunizations. In drug discovery, for example, human proteins, such as hIL-5, have been fused with Fc portions for the purpose of high-throughput screening assays to identify antagonists of hIL-5. (See, D. Bennett et al., J. Molecular Recognition 8:52-58 (1995); K. Johanson et al., J. Biol. Chem. 270:9459-9471 (1995).)

[0118] Moreover, the polypeptides of the present invention can be fused to marker sequences, such as a peptide which facilitates purification of the fused polypeptide. In preferred embodiments, the marker amino acid sequence is a hexa-histidine peptide, such as the tag provided in a pQE vector (QIAGEN, Inc., 9259 Eton Avenue, Chatsworth, Calif., 91311), among others, many of which are commercially available. As described in Gentz et al., Proc. Natl. Acad. Sci. USA 86:821-824 (1989), for instance, hexa-histidine provides for convenient purification of the fusion protein. Another peptide tag useful for purification, the “HA” tag, corresponds to an epitope derived from the influenza hemagglutinin protein. (Wilson et al., Cell 37:767 (1984).)

[0119] Thus, any of these above fusions can be engineered using the polynucleotides or the polypeptides of the present invention.

[0120] Nucleic acids encoding the above epitopes can also be recombined with a gene of interest as an epitope tag (e.g., the hemagglutinin (“HA”) tag or flag tag) to aid in detection and purification of the expressed polypeptide. For example, a system described by Janknecht et al. allows for the ready purification of non-denatured fusion proteins expressed in human cell lines (Janknecht et al., Proc. Natl. Acad. Sci. USA 88:8972-897 (1991)). In this system, the gene of interest is subcloned into a vaccinia recombination plasmid such that the open reading frame of the gene is translationally fused to an amino-terminal tag consisting of six histidine residues. The tag serves as a matrix binding domain for the fusion protein. Extracts from cells infected with the recombinant vaccinia virus are loaded onto Ni2+ nitriloacetic acid-agarose column and histidine-tagged proteins can be selectively eluted with imidazole-containing buffers.

[0121] Additional fusion proteins of the invention may be generated through the techniques of gene-shuffling, motif-shuffling, exon-shuffling, and/or codon-shuffling (collectively referred to as “DNA shuffling”). DNA shuffling may be employed to modulate the activities of polypeptides of the invention, such methods can be used to generate polypeptides with altered activity, as well as agonists and antagonists of the polypeptides. See, generally, U.S. Pat. Nos. 5,605,793; 5,811,238; 5,830,721; 5,834,252; and 5,837,458, and Patten et al., Curr. Opinion Biotechnol. 8:724-33 (1997); Harayama, Trends Biotechnol. 16(2):76-82 (1998); Hansson, et al., J. Mol. Biol. 287:265-76 (1999); and Lorenzo and Blasco, Biotechniques 24(2):308-13 (1998) (each of these patents and publications are hereby incorporated by reference in its entirety). In one embodiment, alteration of polynucleotides corresponding to SEQ ID NO:X and the polypeptides encoded by these polynucleotides may be achieved by DNA shuffling. DNA shuffling involves the assembly of two or more DNA segments by homologous or site-specific recombination to generate variation in the polynucleotide sequence. In another embodiment, polynucleotides of the invention, or the encoded polypeptides, may be altered by being subjected to random mutagenesis by error-prone PCR, random nucleotide insertion or other methods prior to recombination. In another embodiment, one or more components, motifs, sections, parts, domains, fragments, etc., of a polynucleotide encoding a polypeptide of the invention may be recombined with one or more components, motifs, sections, parts, domains, fragments, etc. of one or more heterologous molecules.

[0122] As discussed herein, any polypeptide of the present invention can be used to generate fusion proteins. For example, the polypeptide of the present invention, when fused to a second protein, can be used as an antigenic tag. Antibodies raised against the polypeptide of the present invention can be used to indirectly detect the second protein by binding to the polypeptide. Moreover, because secreted proteins target cellular locations based on trafficking signals, polypeptides of the present invention which are shown to be secreted can be used as targeting molecules once fused to other proteins.

[0123] Examples of domains that can be fused to polypeptides of the present invention include not only heterologous signal sequences, but also other heterologous functional regions. The fusion does not necessarily need to be direct, but may occur through linker sequences.

[0124] In certain preferred embodiments, proteins of the invention comprise fusion proteins wherein the polypeptides are N and/or C-terminal deletion mutants. In preferred embodiments, the application is directed to nucleic acid molecules at least 80%, 85%, 90%, 95%, 96%, 97%, 98% or 99% identical to the nucleic acid sequences encoding polypeptides having the amino acid sequence of the specific N- and C-terminal deletions mutants. Polynucleotides encoding these polypeptides are also encompassed by the invention.

[0125] Moreover, fusion proteins may also be engineered to improve characteristics of the polypeptide of the present invention. For instance, a region of additional amino acids, particularly charged amino acids, may be added to the N-terminus of the polypeptide to improve stability and persistence during purification from the host cell or subsequent handling and storage. Also, peptide moieties may be added to the polypeptide to facilitate purification. Such regions may be removed prior to final preparation of the polypeptide. The addition of peptide moieties to facilitate handling of polypeptides are familiar and routine techniques in the art.

[0126] Vectors, Host Cells, and Protein Production

[0127] The present invention also relates to vectors containing the polynucleotide of the present invention, host cells, and the production of polypeptides by recombinant techniques. The vector may be, for example, a phage, plasmid, viral, or retroviral vector. Retroviral vectors may be replication competent or replication defective. In the latter case, viral propagation generally will occur only in complementing host cells.

[0128] The polynucleotides of the invention may be joined to a vector containing a selectable marker for propagation in a host. Generally, a plasmid vector is introduced in a precipitate, such as a calcium phosphate precipitate, or in a complex with a charged lipid. If the vector is a virus, it may be packaged in vitro using an appropriate packaging cell line and then transduced into host cells.

[0129] The polynucleotide insert should be operatively linked to an appropriate promoter, such as the phage lambda PL promoter, the E. coli lac, trp, phoA and tac promoters, the SV40 early and late promoters and promoters of retroviral LTRs to name a few. Other suitable promoters will be known to the skilled artisan. The expression constructs will further contain sites for transcription initiation, termination, and, in the transcribed region, a ribosome binding site for translation. The coding portion of the transcripts expressed by the constructs will preferably include a translation initiating codon at the beginning and a termination codon (UAA, UGA or UAG) appropriately positioned at the end of the polypeptide to be translated.

[0130] As indicated, the expression vectors will preferably include at least one selectable marker. Such markers include dihydrofolate reductase, G418 or neomycin resistance for eukaryotic cell culture and tetracycline, kanamycin or ampicillin resistance genes for culturing in E. coli and other bacteria. Representative examples of appropriate hosts include, but are not limited to, bacterial cells, such as E. coli, Streptomyces and Salmonella typhimurium cells; fungal cells, such as yeast cells (e.g., Saccharomyces cerevisiae or Pichia pastoris (ATCC Accession No. 201178)); insect cells such as Drosophila S2 and Spodoptera Sf9 cells; animal cells such as CHO, COS, 293, and Bowes melanoma cells; and plant cells. Appropriate culture mediums and conditions for the above-described host cells are known in the art.

[0131] Among vectors preferred for use in bacteria include pQE70, pQE60 and pQE-9, available from QIAGEN, Inc.; pBluescript vectors, Phagescript vectors, pNH8A, pNH16a, pNH18A, pNH46A, available from Stratagene Cloning Systems, Inc.; and ptrc99a, pKK223-3, pKK233-3, pDR540, pRIT5 available from Pharmacia Biotech, Inc. Among preferred eukaryotic vectors are pWLNEO, pSV2CAT, pOG44, pXT1 and pSG available from Stratagene; and pSVK3, pBPV, pMSG and pSVL available from Pharmacia. Preferred expression vectors for use in yeast systems include, but are not limited to pYES2, pYDI, pTEF1/Zeo, pYES2/GS, pPICZ, pGAPZ, pGAPZalph, pPIC9, pPIC3.5, pHIL-D2, pHIL-S1, pPIC3.5K, pPIC9K, and PAO815 (all available from Invitrogen, Carlbad, Calif.). Other suitable vectors will be readily apparent to the skilled artisan.

[0132] Introduction of the construct into the host cell can be effected by calcium phosphate transfection, DEAE-dextran mediated transfection, cationic lipid-mediated transfection, electroporation, transduction, infection, or other methods. Such methods are described in many standard laboratory manuals, such as Davis et al., Basic Methods In Molecular Biology (1986). It is specifically contemplated that the polypeptides of the present invention may in fact be expressed by a host cell lacking a recombinant vector.

[0133] A polypeptide of this invention can be recovered and purified from recombinant cell cultures by well-known methods including ammonium sulfate or ethanol precipitation, acid extraction, anion or cation exchange chromatography, phosphocellulose chromatography, hydrophobic interaction chromatography, affinity chromatography, hydroxylapatite chromatography and lectin chromatography. Most preferably, high performance liquid chromatography (“HPLC”) is employed for purification.

[0134] Polypeptides of the present invention can also be recovered from: products purified from natural sources, including bodily fluids, tissues and cells, whether directly isolated or cultured; products of chemical synthetic procedures; and products produced by recombinant techniques from a prokaryotic or eukaryotic host, including, for example, bacterial, yeast, higher plant, insect, and mammalian cells. Depending upon the host employed in a recombinant production procedure, the polypeptides of the present invention may be glycosylated or may be non-glycosylated. In addition, polypeptides of the invention may also include an initial modified methionine residue, in some cases as a result of host-mediated processes. Thus, it is well known in the art that the N-terminal methionine encoded by the translation initiation codon generally is removed with high efficiency from any protein after translation in all eukaryotic cells. While the N-terminal methionine on most proteins also is efficiently removed in most prokaryotes, for some proteins, this prokaryotic removal process is inefficient, depending on the nature of the amino acid to which the N-terminal methionine is covalently linked.

[0135] In one embodiment, the yeast Pichia pastoris is used to express polypeptides of the invention in a eukaryotic system. Pichia pastoris is a methylotrophic yeast which can metabolize methanol as its sole carbon source. A main step in the methanol metabolization pathway is the oxidation of methanol to formaldehyde using O₂. This reaction is catalyzed by the enzyme alcohol oxidase. In order to metabolize methanol as its sole carbon source, Pichia pastoris must generate high levels of alcohol oxidase due, in part, to the relatively low affinity of alcohol oxidase for O₂. Consequently, in a growth medium depending on methanol as a main carbon source, the promoter region of one of the two alcohol oxidase genes (AOX1) is highly active. In the presence of methanol, alcohol oxidase produced from the AOX1 gene comprises up to approximately 30% of the total soluble protein in Pichia pastoris. See, Ellis, S. B., et al., Mol. Cell. Biol. 5:1111-21 (1985); Koutz, P. J, et al., Yeast 5:167-77 (1989); Tschopp, J. F., et al., Nucl. Acids Res. 15:3859-76 (1987). Thus, a heterologous coding sequence, such as, for example, a polynucleotide of the present invention, under the transcriptional regulation of all or part of the AOX1 regulatory sequence is expressed at exceptionally high levels in Pichia yeast grown in the presence of methanol.

[0136] In one example, the plasmid vector pPIC9K is used to express DNA encoding a polypeptide of the invention, as set forth herein, in a Pichea yeast system essentially as described in “Pichia Protocols: Methods in Molecular Biology,” D. R. Higgins and J. Cregg, eds. The Humana Press, Totowa, N.J., 1998. This expression vector allows expression and secretion of a polypeptide of the invention by virtue of the strong AOX1 promoter linked to the Pichia pastoris alkaline phosphatase (PHO) secretory signal peptide (i.e., leader) located upstream of a multiple cloning site.

[0137] Many other yeast vectors could be used in place of pPIC9K, such as, pYES2, pYD1, pTEF1/Zeo, pYES2/GS, pPICZ, pGAPZ, pGAPZalpha, pPIC9, pPIC3.5, pHIL-D2, pHIL-SI, pPIC3.5K, and PAO815, as one skilled in the art would readily appreciate, as long as the proposed expression construct provides appropriately located signals for transcription, translation, secretion (if desired), and the like, including an in-frame AUG as required.

[0138] In another embodiment, high-level expression of a heterologous coding sequence, such as, for example, a polynucleotide of the present invention, may be achieved by cloning the heterologous polynucleotide of the invention into an expression vector such as, for example, pGAPZ or pGAPZalpha, and growing the yeast culture in the absence of methanol.

[0139] In addition to encompassing host cells containing the vector constructs discussed herein, the invention also encompasses primary, secondary, and immortalized host cells of vertebrate origin, particularly mammalian origin, that have been engineered to delete or replace endogenous genetic material (e.g., coding sequence), and/or to include genetic material (e.g., heterologous polynucleotide sequences) that is operably associated with polynucleotides of the invention, and which activates, alters, and/or amplifies endogenous polynucleotides. For example, techniques known in the art may be used to operably associate heterologous control regions (e.g., promoter and/or enhancer) and endogenous polynucleotide sequences via homologous recombination (see, e.g., U.S. Pat. No. 5,641,670, issued Jun. 24, 1997; International Publication No. WO 96/29411, published Sep. 26, 1996; International Publication No. WO 94/12650, published Aug. 4, 1994; Koller et al., Proc. Natl. Acad. Sci. USA 86:8932-8935 (1989); and Zijlstra et al., Nature 342:435-438 (1989), the disclosures of each of which are incorporated by reference in their entireties).

[0140] In addition, polypeptides of the invention can be chemically synthesized using techniques known in the art (e.g., see Creighton, 1983, Proteins: Structures and Molecular Principles, W.H. Freeman & Co., N.Y., and Hunkapiller et al., Nature, 310:105-111 (1984)). For example, a polypeptide corresponding to a fragment of a polypeptide can be synthesized by use of a peptide synthesizer. Furthermore, if desired, nonclassical amino acids or chemical amino acid analogs can be introduced as a substitution or addition into the polypeptide sequence. Non-classical amino acids include, but are not limited to, to the D-isomers of the common amino acids, 2,4-diaminobutyric acid, a-amino isobutyric acid, 4-aminobutyric acid, Abu, 2-amino butyric acid, g-Abu, e-Ahx, 6-amino hexanoic acid, Aib, 2-amino isobutyric acid, 3-amino propionic acid, ornithine, norleucine, norvaline, hydroxyproline, sarcosine, citrulline, homocitrulline, cysteic acid, t-butylglycine, t-butylalanine, phenylglycine, cyclohexylalanine, b-alanine, fluoro-amino acids, designer amino acids such as b-methyl amino acids, Ca-methyl amino acids, Na-methyl amino acids, and amino acid analogs in general. Furthermore, the amino acid can be D (dextrorotary) or L (levorotary).

[0141] Non-naturally occurring variants may be produced using art-known mutagenesis techniques, which include, but are not limited to oligonucleotide mediated mutagenesis, alanine scanning, PCR mutagenesis, site directed mutagenesis (see, e.g., Carter et al., Nucl. Acids Res. 13:4331 (1986); and Zoller et al., Nucl. Acids Res. 10:6487 (1982)), cassette mutagenesis (see, e.g., Wells et al., Gene 34:315 (1985)), restriction selection mutagenesis (see, e.g., Wells et al., Philos. Trans. R. Soc. London SerA 317:415 (1986)).

[0142] The invention additionally, encompasses polypeptides of the present invention which are differentially modified during or after translation, e.g., by glycosylation, acetylation, phosphorylation, amidation, derivatization by known protecting/blocking groups, proteolytic cleavage, linkage to an antibody molecule or other cellular ligand, etc. Any of numerous chemical modifications may be carried out by known techniques, including but not limited, to specific chemical cleavage by cyanogen bromide, trypsin, chymotrypsin, papain, V8 protease, NABH₄; acetylation, formylation, oxidation, reduction; metabolic synthesis in the presence of tunicamycin; etc.

[0143] Additional post-translational modifications encompassed by the invention include, for example, e.g., N-linked or O-linked carbohydrate chains, processing of N-terminal or C-terminal ends), attachment of chemical moieties to the amino acid backbone, chemical modifications of N-linked or O-linked carbohydrate chains, and addition or deletion of an N-terminal methionine residue as a result of procaryotic host cell expression. The polypeptides may also be modified with a detectable label, such as an enzymatic, fluorescent, isotopic or affinity label to allow for detection and isolation of the protein.

[0144] Also provided by the invention are chemically modified derivatives of the polypeptides of the invention which may provide additional advantages such as increased solubility, stability and circulating time of the polypeptide, or decreased immunogenicity (see U.S. Pat. No. 4,179,337). The chemical moieties for derivitization may be selected from water soluble polymers such as polyethylene glycol, ethylene glycol/propylene glycol copolymers, carboxymethylcellulose, dextran, polyvinyl alcohol and the like. The polypeptides may be modified at random positions within the molecule, or at predetermined positions within the molecule and may include one, two, three or more attached chemical moieties.

[0145] The polymer may be of any molecular weight, and may be branched or unbranched. For polyethylene glycol, the preferred molecular weight is between about 1 kDa and about 100 kDa (the term “about” indicating that in preparations of polyethylene glycol, some molecules will weigh more, some less, than the stated molecular weight) for ease in handling and manufacturing. Other sizes may be used, depending on the desired therapeutic profile (e.g., the duration of sustained release desired, the effects, if any on biological activity, the ease in handling, the degree or lack of antigenicity and other known effects of the polyethylene glycol to a therapeutic protein or analog). For example, the polyethylene glycol may have an average molecular weight of about 200; 500; 1000; 1500; 2000; 2500; 3000; 3500; 4000; 4500; 5000; 5500; 6000; 6500; 7000; 7500; 8000; 8500; 9000; 9500; 10,000; 10,500; 11,000; 11,500; 12,000; 12,500; 13,000; 13,500; 14,000; 14,500; 15,000; 15,500; 16,000; 16,500; 17,000; 17,500; 18,000; 18,500; 19,000; 19,500; 20,000; 25,000; 30,000; 35,000; 40,000; 50,000; 55,000; 60,000; 65,000; 70,000; 75,000; 80,000; 85,000; 90,000; 95,000; or 100,000 kDa.

[0146] As noted above, the polyethylene glycol may have a branched structure. Branched polyethylene glycols are described, for example, in U.S. Pat. No. 5,643,575; Morpurgo et al., Appl. Biochem. Biotechnol. 56:59-72 (1996); Vorobjev et al., Nucleosides Nucleotides 18:2745-2750 (1999); and Caliceti et al., Bioconjug. Chem. 10:638-646 (1999), the disclosures of each of which are incorporated herein by reference.

[0147] The polyethylene glycol molecules (or other chemical moieties) should be attached to the protein with consideration of effects on functional or antigenic domains of the protein. There are a number of attachment methods available to those skilled in the art, e.g., EP 0 401 384, herein incorporated by reference (coupling PEG to G-CSF), see also Malik et al., Exp. Hematol. 20:1028-1035 (1992) (reporting pegylation of GM-CSF using tresyl chloride). For example, polyethylene glycol may be covalently bound through amino acid residues via a reactive group, such as, a free amino or carboxyl group. Reactive groups are those to which an activated polyethylene glycol molecule may be bound. The amino acid residues having a free amino group may include lysine residues and the N-terminal amino acid residues; those having a free carboxyl group may include aspartic acid residues glutamic acid residues and the C-terminal amino acid residue. Sulfhydryl groups may also be used as a reactive group for attaching the polyethylene glycol molecules. Preferred for therapeutic purposes is attachment at an amino group, such as attachment at the N-terminus or lysine group.

[0148] As suggested above, polyethylene glycol may be attached to proteins via linkage to any of a number of amino acid residues. For example, polyethylene glycol can be linked to a proteins via covalent bonds to lysine, histidine, aspartic acid, glutamic acid, or cysteine residues. One or more reaction chemistries may be employed to attach polyethylene glycol to specific amino acid residues (e.g., lysine, histidine, aspartic acid, glutamic acid, or cysteine) of the protein or to more than one type of amino acid residue (e.g., lysine, histidine, aspartic acid, glutamic acid, cysteine and combinations thereof) of the protein.

[0149] One may specifically desire proteins chemically modified at the N-terminus. Using polyethylene glycol as an illustration of the present composition, one may select from a variety of polyethylene glycol molecules (by molecular weight, branching, etc.), the proportion of polyethylene glycol molecules to protein (polypeptide) molecules in the reaction mix, the type of pegylation reaction to be performed, and the method of obtaining the selected N-terminally pegylated protein. The method of obtaining the N-terminally pegylated preparation (i.e., separating this moiety from other monopegylated moieties if necessary) may be by purification of the N-terminally pegylated material from a population of pegylated protein molecules. Selective proteins chemically modified at the N-terminus modification may be accomplished by reductive alkylation which exploits differential reactivity of different types of primary amino groups (lysine versus the N-terminal) available for derivatization in a particular protein. Under the appropriate reaction conditions, substantially selective derivatization of the protein at the N-terminus with a carbonyl group containing polymer is achieved.

[0150] As indicated above, pegylation of the proteins of the invention may be accomplished by any number of means. For example, polyethylene glycol may be attached to the protein either directly or by an intervening linker. Linkerless systems for attaching polyethylene glycol to proteins are described in Delgado et al., Crit. Rev. Thera. Drug Carrier Sys. 9:249-304 (1992); Francis et al., Intern. J. of Hematol. 68:1-18 (1998); U.S. Pat. No. 4,002,531; U.S. Pat. No. 5,349,052; WO 95/06058; and WO 98/32466, the disclosures of each of which are incorporated herein by reference.

[0151] One system for attaching polyethylene glycol directly to amino acid residues of proteins without an intervening linker employs tresylated MPEG, which is produced by the modification of monmethoxy polyethylene glycol (MPEG) using tresylchloride (ClSO₂CH₂CF₃). Upon reaction of protein with tresylated MPEG, polyethylene glycol is directly attached to amine groups of the protein. Thus, the invention includes protein-polyethylene glycol conjugates produced by reacting proteins of the invention with a polyethylene glycol molecule having a 2,2,2-trifluoreothane sulphonyl group.

[0152] Polyethylene glycol can also be attached to proteins using a number of different intervening linkers. For example, U.S. Pat. No. 5,612,460, the entire disclosure of which is incorporated herein by reference, discloses urethane linkers for connecting polyethylene glycol to proteins. Protein-polyethylene glycol conjugates wherein the polyethylene glycol is attached to the protein by a linker can also be produced by reaction of proteins with compounds such as MPEG-succinimidylsuccinate, MPEG activated with 1,1′-carbonyldiimidazole, MPEG-2,4,5-trichloropenylcarbonate, MPEG-p-nitrophenolcarbonate, and various MPEG-succinate derivatives. A number additional polyethylene glycol derivatives and reaction chemistries for attaching polyethylene glycol to proteins are described in WO 98/32466, the entire disclosure of which is incorporated herein by reference. Pegylated protein products produced using the reaction chemistries set out herein are included within the scope of the invention.

[0153] The number of polyethylene glycol moieties attached to each protein of the invention (i.e., the degree of substitution) may also vary. For example, the pegylated proteins of the invention may be linked, on average, to 1, 2, 3, 4, 5, 6, 7, 8, 9, 10, 12, 15, 17, 20, or more polyethylene glycol molecules. Similarly, the average degree of substitution within ranges such as 1-3, 2-4, 3-5, 4-6, 5-7, 6-8, 7-9, 8-10, 9-11, 10-12, 11-13, 12-14, 13-15, 14-16, 15-17, 16-18, 17-19, or 18-20 polyethylene glycol moieties per protein molecule. Methods for determining the degree of substitution are discussed, for example, in Delgado et al., Crit. Rev. Thera. Drug Carrier Sys. 9:249-304 (1992).

[0154] The lung cancer antigen polypeptides of the invention may be in monomers or multimers (i.e., dimers, trimers, tetramers and higher multimers). Accordingly, the present invention relates to monomers and multimers of the polypeptides of the invention, their preparation, and compositions (preferably, Therapeutics) containing them. In specific embodiments, the polypeptides of the invention are monomers, dimers, trimers or tetramers. In additional embodiments, the multimers of the invention are at least dimers, at least trimers, or at least tetramers.

[0155] Multimers encompassed by the invention may be homomers or heteromers. As used herein, the term homomer, refers to a multimer containing only polypeptides corresponding to the amino acid sequence of SEQ ID NO:Y or an amino acid sequence encoded by SEQ ID NO:X, and/or an amino acid sequence encoded by the cDNA in a related cDNA clone contained in a deposited library (including fragments, variants, splice variants, and fusion proteins, corresponding to any one of these as described herein). These homomers may contain polypeptides having identical or different amino acid sequences. In a specific embodiment, a homomer of the invention is a multimer containing only polypeptides having an identical amino acid sequence. In another specific embodiment, a homomer of the invention is a multimer containing polypeptides having different amino acid sequences. In specific embodiments, the multimer of the invention is a homodimer (e.g., containing polypeptides having identical or different amino acid sequences) or a homotrimer (e.g., containing polypeptides having identical and/or different amino acid sequences). In additional embodiments, the homomeric multimer of the invention is at least a homodimer, at least a homotrimer, or at least a homotetramer.

[0156] As used herein, the term heteromer refers to a multimer containing one or more heterologous polypeptides (i.e., polypeptides of different proteins) in addition to the polypeptides of the invention. In a specific embodiment, the multimer of the invention is a heterodimer, a heterotrimer, or a heterotetramer. In additional embodiments, the heteromeric multimer of the invention is at least a heterodimer, at least a heterotrimer, or at least a heterotetramer.

[0157] Multimers of the invention may be the result of hydrophobic, hydrophilic, ionic and/or covalent associations and/or may be indirectly linked, by for example, liposome formation. Thus, in one embodiment, multimers of the invention, such as, for example, homodimers or homotrimers, are formed when polypeptides of the invention contact one another in solution. In another embodiment, heteromultimers of the invention, such as, for example, heterotrimers or heterotetramers, are formed when polypeptides of the invention contact antibodies to the polypeptides of the invention (including antibodies to the heterologous polypeptide sequence in a fusion protein of the invention) in solution. In other embodiments, multimers of the invention are formed by covalent associations with and/or between the polypeptides of the invention. Such covalent associations may involve one or more amino acid residues contained in the polypeptide sequence (e.g., that recited in SEQ ID NO:Y, or contained in a polypeptide encoded by SEQ ID NO:X, and/or by the cDNA in the related cDNA clone contained in a deposited library). In one instance, the covalent associations are cross-linking between cysteine residues located within the polypeptide sequences which interact in the native (i.e., naturally occurring) polypeptide. In another instance, the covalent associations are the consequence of chemical or recombinant manipulation. Alternatively, such covalent associations may involve one or more amino acid residues contained in the heterologous polypeptide sequence in a fusion protein. In one example, covalent associations are between the heterologous sequence contained in a fusion protein of the invention (see, e.g., U.S. Pat. No. 5,478,925). In a specific example, the covalent associations are between the heterologous sequence contained in a Fc fusion protein of the invention (as described herein). In another specific example, covalent associations of fusion proteins of the invention are between heterologous polypeptide sequence from another protein that is capable of forming covalently associated multimers, such as for example, oseteoprotegerin (see, e.g., International Publication NO: WO 98/49305, the contents of which are herein incorporated by reference in its entirety). In another embodiment, two or more polypeptides of the invention are joined through peptide linkers. Examples include those peptide linkers described in U.S. Pat. No. 5,073,627 (hereby incorporated by reference). Proteins comprising multiple polypeptides of the invention separated by peptide linkers may be produced using conventional recombinant DNA technology.

[0158] Another method for preparing multimer polypeptides of the invention involves use of polypeptides of the invention fused to a leucine zipper or isoleucine zipper polypeptide sequence. Leucine zipper and isoleucine zipper domains are polypeptides that promote multimerization of the proteins in which they are found. Leucine zippers were originally identified in several DNA-binding proteins (Landschulz et al., Science 240:1759, (1988)), and have since been found in a variety of different proteins. Among the known leucine zippers are naturally occurring peptides and derivatives thereof that dimerize or trimerize. Examples of leucine zipper domains suitable for producing soluble multimeric proteins of the invention are those described in PCT application WO 94/10308, hereby incorporated by reference. Recombinant fusion proteins comprising a polypeptide of the invention fused to a polypeptide sequence that dimerizes or trimerizes in solution are expressed in suitable host cells, and the resulting soluble multimeric fusion protein is recovered from the culture supernatant using techniques known in the art.

[0159] Trimeric polypeptides of the invention may offer the advantage of enhanced biological activity. Preferred leucine zipper moieties and isoleucine moieties are those that preferentially form trimers. One example is a leucine zipper derived from lung surfactant protein D (SPD), as described in Hoppe et al. (FEBS Letters 344:191, (1994)) and in U.S. patent application Ser. No. 08/446,922, hereby incorporated by reference. Other peptides derived from naturally occurring trimeric proteins may be employed in preparing trimeric polypeptides of the invention.

[0160] In another example, proteins of the invention are associated by interactions between Flag® polypeptide sequence contained in fusion proteins of the invention containing Flag® polypeptide seuqence. In a further embodiment, associations proteins of the invention are associated by interactions between heterologous polypeptide sequence contained in Flag® fusion proteins of the invention and anti-Flag® antibody.

[0161] The multimers of the invention may be generated using chemical techniques known in the art. For example, polypeptides desired to be contained in the multimers of the invention may be chemically cross-linked using linker molecules and linker molecule length optimization techniques known in the art (see, e.g., U.S. Pat. No. 5,478,925, which is herein incorporated by reference in its entirety). Additionally, multimers of the invention may be generated using techniques known in the art to form one or more inter-molecule cross-links between the cysteine residues located within the sequence of the polypeptides desired to be contained in the multimer (see, e.g., U.S. Pat. No. 5,478,925, which is herein incorporated by reference in its entirety). Further, polypeptides of the invention may be routinely modified by the addition of cysteine or biotin to the C-terminus or N-terminus of the polypeptide and techniques known in the art may be applied to generate multimers containing one or more of these modified polypeptides (see, e.g., U.S. Pat. No. 5,478,925, which is herein incorporated by reference in its entirety). Additionally, techniques known in the art may be applied to generate liposomes containing the polypeptide components desired to be contained in the multimer of the invention (see, e.g., U.S. Pat. No. 5,478,925, which is herein incorporated by reference in its entirety).

[0162] Alternatively, multimers of the invention may be generated using genetic engineering techniques known in the art. In one embodiment, polypeptides contained in multimers of the invention are produced recombinantly using fusion protein technology described herein or otherwise known in the art (see, e.g., U.S. Pat. No. 5,478,925, which is herein incorporated by reference in its entirety). In a specific embodiment, polynucleotides coding for a homodimer of the invention are generated by ligating a polynucleotide sequence encoding a polypeptide of the invention to a sequence encoding a linker polypeptide and then further to a synthetic polynucleotide encoding the translated product of the polypeptide in the reverse orientation from the original C-terminus to the N-terminus (lacking the leader sequence) (see, e.g., U.S. Pat. No. 5,478,925, which is herein incorporated by reference in its entirety). In another embodiment, recombinant techniques described herein or otherwise known in the art are applied to generate recombinant polypeptides of the invention which contain a transmembrane domain (or hyrophobic or signal peptide) and which can be incorporated by membrane reconstitution techniques into liposomes (see, e.g., U.S. Pat. No. 5,478,925, which is herein incorporated by reference in its entirety).

[0163] Antibodies

[0164] Further polypeptides of the invention relate to antibodies and T-cell antigen receptors (TCR) which immunospecifically bind a polypeptide, polypeptide fragment, or variant of SEQ ID NO:Y, and/or an epitope, of the present invention (as determined by immunoassays well known in the art for assaying specific antibody-antigen binding). Antibodies of the invention include, but are not limited to, polyclonal, monoclonal, multispecific, human, humanized or chimeric antibodies, single chain antibodies, Fab fragments, ab′) fragments, fragments produced by a Fab expression library, anti-idiotypic (anti-Id) antibodies (including, e.g., anti-Id antibodies to antibodies of the invention), and epitope-binding fragments of any of the above. The term “antibody,” as used herein, refers to immunoglobulin molecules and immunologically active portions of immunoglobulin molecules, i.e., molecules that contain an antigen binding site that immunospecifically binds an antigen. The immunoglobulin molecules of the invention can be of any type (e.g., IgG, IgE, IgM, IgD, IgA and IgY), class (e.g., IgG1, IgG2, IgG3, IgG4, IgA1 and IgA2) or subclass of immunoglobulin molecule.

[0165] Most preferably the antibodies are human antigen-binding antibody fragments of the present invention and include, but are not limited to, Fab, Fab′ and ab′)2, Fd, single-chain Fvs (scFv), single-chain antibodies, disulfide-linked Fvs (sdFv) and fragments comprising either a VL or VH domain. Antigen-binding antibody fragments, including single-chain antibodies, may comprise the variable regios) alone or in combination with the entirety or a portion of the following: hinge region, CHi, CH2, and CH3 domains. Also included in the invention are antigen-binding fragments also comprising any combination of variable regios) with a hinge region, CH1, CH2, and CH3 domains. The antibodies of the invention may be from any animal origin including birds and mammals. Preferably, the antibodies are human, murine (e.g., mouse and rat), donkey, ship rabbit, goat, guinea pig, camel, horse, or chicken. As used herein, “human” antibodies include antibodies having the amino acid sequence of a human immunoglobulin and include antibodies isolated from human immunoglobulin libraries or from animals transgenic for one or more human immunoglobulin and that do not express endogenous immunoglobulins, as described infra and, for example in, U.S. Pat. No. 5,939,598 by Kucherlapati et al.

[0166] The antibodies of the present invention may be monospecific, bispecific, trispecific or of greater multispecificity. Multispecific antibodies may be specific for different epitopes of a polypeptide of the present invention or may be specific for both a polypeptide of the present invention as well as for a heterologous epitope, such as a heterologous polypeptide or solid support material. See, e.g., PCT publications WO 93/17715; WO 92/08802; WO 91/00360; WO 92/05793; Tutt, et al., J. Immunol. 147:60-69 (1991); U.S. Pat. Nos. 4,474,893; 4,714,681; 4,925,648; 5,573,920; 5,601,819; Kostelny et al., J. Immunol. 148:1547-1553 (1992).

[0167] Antibodies of the present invention may be described or specified in terms of the epitops) or portios) of a polypeptide of the present invention which they recognize or specifically bind. The epitops) or polypeptide portios) may be specified as described herein, e.g., by N-terminal and C-terminal positions, or by size in contiguous amino acid residues. Antibodies which specifically bind any epitope or polypeptide of the present invention may also be excluded. Therefore, the present invention includes antibodies that specifically bind polypeptides of the present invention, and allows for the exclusion of the same.

[0168] Antibodies of the present invention may also be described or specified in terms of their cross-reactivity. Antibodies that do not bind any other analog, ortholog, or homolog of a polypeptide of the present invention are included. Antibodies that bind polypeptides with at least 95%, at least 90%, at least 85%, at least 80%, at least 75%, at least 70%, at least 65%, at least 60%, at least 55%, and at least 50% identity (as calculated using methods known in the art and described herein) to a polypeptide of the present invention are also included in the present invention. In specific embodiments, antibodies of the present invention cross-react with murine, rat and/or rabbit homologs of human proteins and the corresponding epitopes thereof. Antibodies that do not bind polypeptides with less than 95%, less than 90%, less than 85%, less than 80%, less than 75%, less than 70%, less than 65%, less than 60%, less than 55%, and less than 50% identity (as calculated using methods known in the art and described herein) to a polypeptide of the present invention are also included in the present invention. In a specific embodiment, the above-described cross-reactivity is with respect to any single specific antigenic or immunogenic polypeptide, or combinatios) of 2, 3, 4, 5, or more of the specific antigenic and/or immunogenic polypeptides disclosed herein. Further included in the present invention are antibodies which bind polypeptides encoded by polynucleotides which hybridize to a polynucleotide of the present invention under stringent hybridization conditions (as described herein). Antibodies of the present invention may also be described or specified in terms of their binding affinity to a polypeptide of the invention. Preferred binding affinities include those with a dissociation constant or Kd less than 5×10⁻² M, 10⁻² M, 5×10⁻³M, 10⁻³ M, 5×10⁻⁴ M, 10⁻⁴ M, 5×10⁻⁵ M, 10⁻⁵ M, 5×10^{31 6} M, 10⁻⁶M, 5×10⁻⁷ M, 10⁷ M, 5×10⁻⁸ M, 10⁻⁸ M, 5×10⁻⁹ M, 10⁻⁹ M, 5×10⁻¹⁰ M, 10⁻¹⁰ M, 5×10⁻¹¹ M, 10⁻¹¹ M, 5×10 ⁻¹² M, N¹⁰⁻¹² M, 5×10⁻¹³ M, 10⁻¹³ M, 5×10⁻¹⁴ M, 1 ⁻¹⁴ M, 5×10⁻¹⁵ M, or ¹⁰⁻¹⁵ M.

[0169] The invention also provides antibodies that competitively inhibit binding of an antibody to an epitope of the invention as determined by any method known in the art for determining competitive binding, for example, the immunoassays described herein. In preferred embodiments, the antibody competitively inhibits binding to the epitope by at least 95%, at least 90%, at least 85%, at least 80%, at least 75%, at least 70%, at least 60%, or at least 50%.

[0170] Antibodies of the present invention may act as agonists or antagonists of the polypeptides of the present invention. For example, the present invention includes antibodies which disrupt the receptor/ligand interactions with the polypeptides of the invention either partially or fully. Preferrably, antibodies of the present invention bind an antigenic epitope disclosed herein, or a portion thereof. The invention features both receptor-specific antibodies and ligand-specific antibodies. The invention also features receptor-specific antibodies which do not prevent ligand binding but prevent receptor activation. Receptor activation (i.e., signaling) may be determined by techniques described herein or otherwise known in the art. For example, receptor activation can be determined by detecting the phosphorylation (e.g., tyrosine or serine/threonine) of the receptor or its substrate by immunoprecipitation followed by western blot analysis (for example, as described supra). In specific embodiments, antibodies are provided that inhibit ligand activity or receptor activity by at least 95%, at least 90%, at least 85%, at least 80%, at least 75%, at least 70%, at least 60%, or at least 50% of the activity in absence of the antibody.

[0171] The invention also features receptor-specific antibodies which both prevent ligand binding and receptor activation as well as antibodies that recognize the receptor-ligand complex, and, preferably, do not specifically recognize the unbound receptor or the unbound ligand. Likewise, included in the invention are neutralizing antibodies which bind the ligand and prevent binding of the ligand to the receptor, as well as antibodies which bind the ligand, thereby preventing receptor activation, but do not prevent the ligand from binding the receptor. Further included in the invention are antibodies which activate the receptor. These antibodies may act as receptor agonists, i.e., potentiate or activate either all or a subset of the biological activities of the ligand-mediated receptor activation, for example, by inducing dimerization of the receptor. The antibodies may be specified as agonists, antagonists or inverse agonists for biological activities comprising the specific biological activities of the peptides of the invention disclosed herein. The above antibody agonists can be made using methods known in the art. See, e.g., PCT publication WO 96/40281; U.S. Pat. No. 5,811,097; Deng et al., Blood 92(6):1981-1988 (1998); Chen et al., Cancer Res. 58(16):3668-3678 (1998); Harrop et al., J. Immunol. 161(4):1786-1794 (1998); Zhu et al., Cancer Res. 58(15):3209-3214 (1998); Yoon et al., J. Immunol. 160(7):3170-3179 (1998); Prat et al., J. Cell. Sci. 111(Pt2):237-247 (1998); Pitard et al., J. Immunol. Methods 205(2):177-190 (1997); Liautard et al., Cytokine 9(4):233-241 (1997); Carlson et al., J. Biol. Chem. 272(17):11295-11301 (1997); Taryman et al., Neuron 14(4):755-762 (1995); Muller et al., Structure 6(9):1153-1167 (1998); Bartunek et al., Cytokine 8(1):14-20 (1996) (which are all incorporated by reference herein in their entireties).

[0172] Antibodies of the present invention may be used, for example, but not limited to, to purify, detect, and target the polypeptides of the present invention, including both in vitro and in vivo diagnostic and therapeutic methods. For example, the antibodies have use in immunoassays for qualitatively and quantitatively measuring levels of the polypeptides of the present invention in biological samples. See, e.g., Harlow et al., Antibodies: A Laboratory Manual, (Cold Spring Harbor Laboratory Press, 2nd ed. 1988) (incorporated by reference herein in its entirety).

[0173] As discussed in more detail below, the antibodies of the present invention may be used either alone or in combination with other compositions. The antibodies may further be recombinantly fused to a heterologous polypeptide at the N- or C-terminus or chemically conjugated (including covalently and non-covalently conjugations) to polypeptides or other compositions. For example, antibodies of the present invention may be recombinantly fused or conjugated to molecules useful as labels in detection assays and effector molecules such as heterologous polypeptides, drugs, radionuclides, or toxins. See, e.g., PCT publications WO 92/08495; WO 91/14438; WO 89/12624; U.S. Pat. No. 5,314,995; and EP 396,387.

[0174] The antibodies of the invention include derivatives that are modified, i.e, by the covalent attachment of any type of molecule to the antibody such that covalent attachment does not prevent the antibody from generating an anti-idiotypic response. For example, but not by way of limitation, the antibody derivatives include antibodies that have been modified, e.g., by glycosylation, acetylation, pegylation, phosphylation, amidation, derivatization by known protecting/blocking groups, proteolytic cleavage, linkage to a cellular ligand or other protein, etc. Any of numerous chemical modifications may be carried out by known techniques, including, but not limited to specific chemical cleavage, acetylation, formylation, metabolic synthesis of tunicamycin, etc. Additionally, the derivative may contain one or more non-classical amino acids.

[0175] The antibodies of the present invention may be generated by any suitable method known in the art. Polyclonal antibodies to an antigen-of- interest can be produced by various procedures well known in the art. For example, a polypeptide of the invention can be administered to various host animals including, but not limited to, rabbits, mice, rats, etc. to induce the production of sera containing polyclonal antibodies specific for the antigen. Various adjuvants may be used to increase the immunological response, depending on the host species, and include but are not limited to, Freund's (complete and incomplete), mineral gels such as aluminum hydroxide, surface active substances such as lysolecithin, pluronic polyols, polyanions, peptides, oil emulsions, keyhole limpet hemocyanins, dinitrophenol, and potentially useful human adjuvants such as BCG (bacille Calmette-Guerin) and corynebacterium parvum. Such adjuvants are also well known in the art.

[0176] Monoclonal antibodies can be prepared using a wide variety of techniques known in the art including the use of hybridoma, recombinant, and phage display technologies, or a combination thereof. For example, monoclonal antibodies can be produced using hybridoma techniques including those known in the art and taught, for example, in Harlow et al., Antibodies: A Laboratory Manual, (Cold Spring Harbor Laboratory Press, 2nd ed. 1988); Hammerling, et al., in: Monoclonal Antibodies and T-Cell Hybridomas 563-681 (Elsevier, N.Y., 1981) (said references incorporated by reference in their entireties). The term “monoclonal antibody” as used herein is not limited to antibodies produced through hybridoma technology. The term “monoclonal antibody” refers to an antibody that is derived from a single clone, including any eukaryotic, prokaryotic, or phage clone, and not the method by which it is produced.

[0177] Methods for producing and screening for specific antibodies using hybridoma technology are routine and well known in the art and are discussed in detail in the Examples. In a non-limiting example, mice can be immunized with a polypeptide of the invention or a cell expressing such peptide. Once an immune response is detected, e.g., antibodies specific for the antigen are detected in the mouse serum, the mouse spleen is harvested and splenocytes isolated. The splenocytes are then fused by well known techniques to any suitable myeloma cells, for example cells from cell line SP20 available from the ATCC. Hybridomas are selected and cloned by limited dilution. The hybridoma clones are then assayed by methods known in the art for cells that secrete antibodies capable of binding a polypeptide of the invention. Ascites fluid, which generally contains high levels of antibodies, can be generated by immunizing mice with positive hybridoma clones.

[0178] Accordingly, the present invention provides methods of generating monoclonal antibodies as well as antibodies produced by the method comprising culturing a hybridoma cell secreting an antibody of the invention wherein, preferably, the hybridoma is generated by fusing splenocytes isolated from a mouse immunized with an antigen of the invention with myeloma cells and then screening the hybridomas resulting from the fusion for hybridoma clones that secrete an antibody able to bind a polypeptide of the invention.

[0179] Antibody fragments which recognize specific epitopes may be generated by known techniques. For example, Fab and ab′)2 fragments of the invention may be produced by proteolytic cleavage of immunoglobulin molecules, using enzymes such as papain (to produce Fab fragments) or pepsin (to produce ab′)2 fragments). ab′)2 fragments contain the variable region, the light chain constant region and the CHI domain of the heavy chain.

[0180] For example, the antibodies of the present invention can also be generated using various phage display methods known in the art. In phage display methods, functional antibody domains are displayed on the surface of phage particles which carry the polynucleotide sequences encoding them. In a particular embodiment, such phage can be utilized to display antigen binding domains expressed from a repertoire or combinatorial antibody library (e.g., human or murine). Phage expressing an antigen binding domain that binds the antigen of interest can be selected or identified with antigen, e.g., using labeled antigen or antigen bound or captured to a solid surface or bead. Phage used in these methods are typically filamentous phage including fd and M13 binding domains expressed from phage with Fab, Fv or disulfide stabilized Fv antibody domains recombinantly fused to either the phage gene III or gene VIII protein. Examples of phage display methods that can be used to make the antibodies of the present invention include those disclosed in Brinkman et al., J. Immunol. Methods 182:41-50 (1995); Ames et al., J. Immunol. Methods 184:177-186 (1995); Kettleborough et al., Eur. J. Immunol. 24:952-958 (1994); Persic et al., Gene 187 9-18 (1997); Burton et al., Advances in Immunology 57:191-280 (1994); PCT application No. PCT/GB91/01134; PCT publications WO 90/02809; WO 91/10737; WO 92/01047; WO 92/18619; WO 93/11236; WO 95/15982; WO 95/20401; and U.S. Pat. Nos. 5,698,426; 5,223,409; 5,403,484; 5,580,717; 5,427,908; 5,750,753; 5,821,047; 5,571,698; 5,427,908; 5,516,637; 5,780,225; 5,658,727; 5,733,743 and 5,969,108; each of which is incorporated herein by reference in its entirety.

[0181] As described in the above references, after phage selection, the antibody coding regions from the phage can be isolated and used to generate whole antibodies, including human antibodies, or any other desired antigen binding fragment, and expressed in any desired host, including mammalian cells, insect cells, plant cells, yeast, and bacteria, e.g., as described in detail below. For example, techniques to recombinantly produce Fab, Fab′ and ab′)2 fragments can also be employed using methods known in the art such as those disclosed in PCT publication WO 92/22324; Mullinax et al., BioTechniques 12(6):864-869 (1992); and Sawai et al., AJRI 34:26-34 (1995); and Better et al., Science 240:1041-1043 (1988) (said references incorporated by reference in their entireties).

[0182] Examples of techniques which can be used to produce single-chain Fvs and antibodies include those described in U.S. Pat. Nos. 4,946,778 and 5,258,498; Huston et al., Methods in Enzymology 203:46-88 (1991); Shu et al., PNAS 90:7995-7999 (1993); and Skerra et al., Science 240:1038-1040 (1988). For some uses, including in vivo use of antibodies in humans and in vitro detection assays, it may be preferable to use chimeric, humanized, or human antibodies. A chimeric antibody is a molecule in which different portions of the antibody are derived from different animal species, such as antibodies having a variable region derived from a murine monoclonal antibody and a human immunoglobulin constant region. Methods for producing chimeric antibodies are known in the art. See e.g., Morrison, Science 229:1202 (1985); Oi et al., BioTechniques 4:214 (1986); Gillies et al., (1989) J. Immunol. Methods 125:191-202; U.S. Pat. Nos. 5,807,715; 4,816,567; and 4,816397, which are incorporated herein by reference in their entirety. Humanized antibodies are antibody molecules from non-human species antibody that binds the desired antigen having one or more complementarity determining regions (CDRs) from the non-human species and a framework regions from a human immunoglobulin molecule. Often, framework residues in the human framework regions will be substituted with the corresponding residue from the CDR donor antibody to alter, preferably improve, antigen binding. These framework substitutions are identified by methods well known in the art, e.g., by modeling of the interactions of the CDR and framework residues to identify framework residues important for antigen binding and sequence comparison to identify unusual framework residues at particular positions. (See, e.g., Queen et al., U.S. Pat. No. 5,585,089; Riechmann et al., Nature 332:323 (1988), which are incorporated herein by reference in their entireties.) Antibodies can be humanized using a variety of techniques known in the art including, for example, CDR-grafting (EP 239,400; PCT publication WO 91/09967; U.S. Pat. Nos. 5,225,539; 5,530,101; and 5,585,089), veneering or resurfacing (EP 592,106; EP 519,596; Padlan, Molecular Immunology 28(4/5):489-498 (1991); Studnicka et al., Protein Engineering 7(6):805-814 (1994); Roguska. et al., PNAS 91:969-973 (1994)), and chain shuffling (U.S. Pat. No. 5,565,332).

[0183] Completely human antibodies are particularly desirable for therapeutic treatment of human patients. Human antibodies can be made by a variety of methods known in the art including phage display methods described above using antibody libraries derived from human immunoglobulin sequences. See also, U.S. Pat. Nos. 4,444,887 and 4,716,111; and PCT publications WO 98/46645, WO 98/50433, WO 98/24893, WO 98/16654, WO 96/34096, WO 96/33735, and WO 91/10741; each of which is incorporated herein by reference in its entirety.

[0184] Human antibodies can also be produced using transgenic mice which are incapable of expressing functional endogenous immunoglobulins, but which can express human immunoglobulin genes. For example, the human heavy and light chain immunoglobulin gene complexes may be introduced randomly or by homologous recombination into mouse embryonic stem cells. Alternatively, the human variable region, constant region, and diversity region may be introduced into mouse embryonic stem cells in addition to the human heavy and light chain genes. The mouse heavy and light chain immunoglobulin genes may be rendered non-functional separately or simultaneously with the introduction of human immunoglobulin loci by homologous recombination. In particular, homozygous deletion of the JH region prevents endogenous antibody production. The modified embryonic stem cells are expanded and microinjected into blastocysts to produce chimeric mice. The chimeric mice are then bred to produce homozygous offspring which express human antibodies. The transgenic mice are immunized in the normal fashion with a selected antigen, e.g., all or a portion of a polypeptide of the invention. Monoclonal antibodies directed against the antigen can be obtained from the immunized, transgenic mice using conventional hybridoma technology. The human immunoglobulin transgenes harbored by the transgenic mice rearrange during B cell differentiation, and subsequently undergo class switching and somatic mutation. Thus, using such a technique, it is possible to produce therapeutically useful IgG, IgA, IgM and IgE antibodies. For an overview of this technology for producing human antibodies, see Lonberg and Huszar, Int. Rev. Immunol. 13:65-93 (1995). For a detailed discussion of this technology for producing human antibodies and human monoclonal antibodies and protocols for producing such antibodies, see, e.g., PCT publications WO 98/24893; WO 92/01047; WO 96/34096; WO 96/33735; European Patent No. 0 598 877; U.S. Pat. Nos. 5,413,923; 5,625,126; 5,633,425; 5,569,825; 5,661,016; 5,545,806; 5,814,318; 5,885,793; 5,916,771; and 5,939,598, which are incorporated by reference herein in their entirety. In addition, companies such as Abgenix, Inc. (Freemont, Calif.) and Genpharm (San Jose, Calif.) can be engaged to provide human antibodies directed against a selected antigen using technology similar to that described above.

[0185] Completely human antibodies which recognize a selected epitope can be generated using a technique referred to as “guided selection.” In this approach a selected non-human monoclonal antibody, e.g., a mouse antibody, is used to guide the selection of a completely human antibody recognizing the same epitope. (Jespers et al., Bio/technology 12:899-903 (1988)).

[0186] Further, antibodies to the polypeptides of the invention can, in turn, be utilized to generate anti-idiotype antibodies that “mimic” polypeptides of the invention using techniques well known to those skilled in the art. (See, e.g., Greenspan & Bona, FASEB J. 7(5):437-444; (1989) and Nissinoff, J. Immunol. 147(8):2429-2438 (1991)). For example, antibodies which bind to and competitively inhibit polypeptide multimerization and/or binding of a polypeptide of the invention to a ligand can be used to generate anti-idiotypes that “mimic” the polypeptide multimerization and/or binding domain and, as a consequence, bind to and neutralize polypeptide and/or its ligand. Such neutralizing anti-idiotypes or Fab fragments of such anti-idiotypes can be used in therapeutic regimens to neutralize polypeptide ligand. For example, such anti-idiotypic antibodies can be used to bind a polypeptide of the invention and/or to bind its ligands/receptors, and thereby block its biological activity.

[0187] Polynucleotides Encoding Antibodies

[0188] The invention further provides polynucleotides comprising a nucleotide sequence encoding an antibody of the invention and fragments thereof. The invention also encompasses polynucleotides that hybridize under stringent or alternatively, under lower stringency hybridization conditions, e.g., as defined supra, to polynucleotides that encode an antibody, preferably, that specifically binds to a polypeptide of the invention, preferably, an antibody that binds to a polypeptide having the amino acid sequence of SEQ ID NO:Y.

[0189] The polynucleotides may be obtained, and the nucleotide sequence of the polynucleotides determined, by any method known in the art. For example, if the nucleotide sequence of the antibody is known, a polynucleotide encoding the antibody may be assembled from chemically synthesized oligonucleotides (e.g., as described in Kutmeier et al., BioTechniques 17:242 (1994)), which, briefly, involves the synthesis of overlapping oligonucleotides containing portions of the sequence encoding the antibody, annealing and ligating of those oligonucleotides, and then amplification of the ligated oligonucleotides by PCR.

[0190] Alternatively, a polynucleotide encoding an antibody may be generated from nucleic acid from a suitable source. If a clone containing a nucleic acid encoding a particular antibody is not available, but the sequence of the antibody molecule is known, a nucleic acid encoding the immunoglobulin may be chemically synthesized or obtained from a suitable source (e.g., an antibody cDNA library, or a cDNA library generated from, or nucleic acid, preferably poly A+ RNA, isolated from, any tissue or cells expressing the antibody, such as hybridoma cells selected to express an antibody of the invention) by PCR amplification using synthetic primers hybridizable to the 3′ and 5′ ends of the sequence or by cloning using an oligonucleotide probe specific for the particular gene sequence to identify, e.g., a cDNA clone from a cDNA library that encodes the antibody. Amplified nucleic acids generated by PCR may then be cloned into replicable cloning vectors using any method well known in the art.

[0191] Once the nucleotide sequence and corresponding amino acid sequence of the antibody is determined, the nucleotide sequence of the antibody may be manipulated using methods well known in the art for the manipulation of nucleotide sequences, e.g., recombinant DNA techniques, site directed mutagenesis, PCR, etc. (see, for example, the techniques described in Sambrook et al., 1990, Molecular Cloning, A Laboratory Manual, 2d Ed., Cold Spring Harbor Laboratory, Cold Spring Harbor, N.Y. and Ausubel et al., eds., 1998, Current Protocols in Molecular Biology, John Wiley & Sons, NY, which are both incorporated by reference herein in their entireties ), to generate antibodies having a different amino acid sequence, for example to create amino acid substitutions, deletions, and/or insertions.

[0192] In a specific embodiment, the amino acid sequence of the heavy and/or light chain variable domains may be inspected to identify the sequences of the complementarity determining regions (CDRs) by methods that are well know in the art, e.g., by comparison to known amino acid sequences of other heavy and light chain variable regions to determine the regions of sequence hypervariability. Using routine recombinant DNA techniques, one or more of the CDRs may be inserted within framework regions, e.g., into human framework regions to humanize a non-human antibody, as described supra. The framework regions may be naturally occurring or consensus framework regions, and preferably human framework regions (see, e.g., Chothia et al., J. Mol. Biol. 278: 457-479 (1998) for a listing of human framework regions). Preferably, the polynucleotide generated by the combination of the framework regions and CDRs encodes an antibody that specifically binds a polypeptide of the invention. Preferably, as discussed supra, one or more amino acid substitutions may be made within the framework regions, and, preferably, the amino acid substitutions improve binding of the antibody to its antigen. Additionally, such methods may be used to make amino acid substitutions or deletions of one or more variable region cysteine residues participating in an intrachain disulfide bond to generate antibody molecules lacking one or more intrachain disulfide bonds. Other alterations to the polynucleotide are encompassed by the present invention and within the skill of the art.

[0193] In addition, techniques developed for the production of “chimeric antibodies” (Morrison et al., Proc. Natl. Acad. Sci. 81:851-855 (1984); Neuberger et al., Nature 312:604-608 (1984); Takeda et al., Nature 314:452-454 (1985)) by splicing genes from a mouse antibody molecule of appropriate antigen specificity together with genes from a human antibody molecule of appropriate biological activity can be used. As described supra, a chimeric antibody is a molecule in which different portions are derived from different animal species, such as those having a variable region derived from a murine mAb and a human immunoglobulin constant region, e.g., humanized antibodies.

[0194] Alternatively, techniques described for the production of single chain antibodies (U.S. Pat. No. 4,946,778; Bird, Science 242:423-42 (1988); Huston et al., Proc. Natl. Acad. Sci. USA 85:5879-5883 (1988); and Ward et al., Nature 334:544-54 (1989)) can be adapted to produce single chain antibodies. Single chain antibodies are formed by linking the heavy and light chain fragments of the Fv region via an amino acid bridge, resulting in a single chain polypeptide. Techniques for the assembly of functional Fv fragments in E. coli may also be used (Skerra et al., Science 242:1038-1041 (1988)).

[0195] Methods of Producing Antibodies

[0196] The antibodies of the invention can be produced by any method known in the art for the synthesis of antibodies, in particular, by chemical synthesis or preferably, by recombinant expression techniques.

[0197] Recombinant expression of an antibody of the invention, or fragment, derivative or analog thereof, (e.g., a heavy or light chain of an antibody of the invention or a single chain antibody of the invention), requires construction of an expression vector containing a polynucleotide that encodes the antibody. Once a polynucleotide encoding an antibody molecule or a heavy or light chain of an antibody, or portion thereof (preferably containing the heavy or light chain variable domain), of the invention has been obtained, the vector for the production of the antibody molecule may be produced by recombinant DNA technology using techniques well known in the art. Thus, methods for preparing a protein by expressing a polynucleotide containing an antibody encoding nucleotide sequence are described herein. Methods which are well known to those skilled in the art can be used to construct expression vectors containing antibody coding sequences and appropriate transcriptional and translational control signals. These methods include, for example, in vitro recombinant DNA techniques, synthetic techniques, and in vivo genetic recombination. The invention, thus, provides replicable vectors comprising a nucleotide sequence encoding an antibody molecule of the invention, or a heavy or light chain thereof, or a heavy or light chain variable domain, operably linked to a promoter. Such vectors may include the nucleotide sequence encoding the constant region of the antibody molecule (see, e.g., PCT Publication WO 86/05807; PCT Publication WO 89/01036; and U.S. Pat. No. 5,122,464) and the variable domain of the antibody may be cloned into such a vector for expression of the entire heavy or light chain.

[0198] The expression vector is transferred to a host cell by conventional techniques and the transfected cells are then cultured by conventional techniques to produce an antibody of the invention. Thus, the invention includes host cells containing a polynucleotide encoding an antibody of the invention, or a heavy or light chain thereof, or a single chain antibody of the invention, operably linked to a heterologous promoter. In preferred embodiments for the expression of double-chained antibodies, vectors encoding both the heavy and light chains may be co-expressed in the host cell for expression of the entire immunoglobulin molecule, as detailed below.

[0199] A variety of host-expression vector systems may be utilized to express the antibody molecules of the invention. Such host-expression systems represent vehicles by which the coding sequences of interest may be produced and subsequently purified, but also represent cells which may, when transformed or transfected with the appropriate nucleotide coding sequences, express an antibody molecule of the invention in situ. These include but are not limited to microorganisms such as bacteria (e.g., E. coli, B. subtilis) transformed with recombinant bacteriophage DNA, plasmid DNA or cosmid DNA expression vectors containing antibody coding sequences; yeast (e.g., Saccharomyces, Pichia) transformed with recombinant yeast expression vectors containing antibody coding sequences; insect cell systems infected with recombinant virus expression vectors (e.g., baculovirus) containing antibody coding sequences; plant cell systems infected with recombinant virus expression vectors (e.g., cauliflower mosaic virus, CaMV; tobacco mosaic virus, TMV) or transformed with recombinant plasmid expression vectors (e.g., Ti plasmid) containing antibody coding sequences; or mammalian cell systems (e.g., COS, CHO, BHK, 293, 3T3 cells) harboring recombinant expression constructs containing promoters derived from the genome of mammalian cells (e.g., metallothionein promoter) or from mammalian viruses (e.g., the adenovirus late promoter; the vaccinia virus 7.5K promoter). Preferably, bacterial cells such as Escherichia coli, and more preferably, eukaryotic cells, especially for the expression of whole recombinant antibody molecule, are used for the expression of a recombinant antibody molecule. For example, mammalian cells such as Chinese hamster ovary cells (CHO), in conjunction with a vector such as the major intermediate early gene promoter element from human cytomegalovirus is an effective expression system for antibodies (Foecking et al., Gene 45:101 (1986); Cockett et al., Bio/Technology 8:2 (1990)).

[0200] In bacterial systems, a number of expression vectors may be advantageously selected depending upon the use intended for the antibody molecule being expressed. For example, when a large quantity of such a protein is to be produced, for the generation of pharmaceutical compositions of an antibody molecule, vectors which direct the expression of high levels of fusion protein products that are readily purified may be desirable. Such vectors include, but are not limited, to the E. coli expression vector pUR278 (Ruther et al., EMBO J. 2:1791 (1983)), in which the antibody coding sequence may be ligated individually into the vector in frame with the lac Z coding region so that a fusion protein is produced; pIN vectors (Inouye & Inouye, Nucleic Acids Res. 13:3101-3109 (1985); Van Heeke & Schuster, J. Biol. Chem. 24:5503-5509 (1989)); and the like. pGEX vectors may also be used to express foreign polypeptides as fusion proteins with glutathione S-transferase (GST). In general, such fusion proteins are soluble and can easily be purified from lysed cells by adsorption and binding to matrix glutathione-agarose beads followed by elution in the presence of free glutathione. The pGEX vectors are designed to include thrombin or factor Xa protease cleavage sites so that the cloned target gene product can be released from the GST moiety.

[0201] In an insect system, Autographa califormica nuclear polyhedrosis virus (AcNPV) is used as a vector to express foreign genes. The virus grows in Spodoptera frugiperda cells. The antibody coding sequence may be cloned individually into non-essential regions (for example the polyhedrin gene) of the virus and placed under control of an AcNPV promoter (for example the polyhedrin promoter).

[0202] In mammalian host cells, a number of viral-based expression systems may be utilized. In cases where an adenovirus is used as an expression vector, the antibody coding sequence of interest may be ligated to an adenovirus transcription/translation control complex, e.g., the late promoter and tripartite leader sequence. This chimeric gene may then be inserted in the adenovirus genome by in vitro or in vivo recombination. Insertion in a non-essential region of the viral genome (e.g., region E1 or E3) will result in a recombinant virus that is viable and capable of expressing the antibody molecule in infected hosts. (e.g., see Logan & Shenk, Proc. Natl. Acad. Sci. USA 81:355-359 (1984)). Specific initiation signals may also be required for efficient translation of inserted antibody coding sequences. These signals include the ATG initiation codon and adjacent sequences. Furthermore, the initiation codon must be in phase with the reading frame of the desired coding sequence to ensure translation of the entire insert. These exogenous translational control signals and initiation codons can be of a variety of origins, both natural and synthetic. The efficiency of expression may be enhanced by the inclusion of appropriate transcription enhancer elements, transcription terminators, etc. (see Bittner et al., Methods in Enzymol. 153:51-544 (1987)).

[0203] In addition, a host cell strain may be chosen which modulates the expression of the inserted sequences, or modifies and processes the gene product in the specific fashion desired. Such modifications (e.g., glycosylation) and processing (e.g., cleavage) of protein products may be important for the function of the protein. Different host cells have characteristic and specific mechanisms for the post-translational processing and modification of proteins and gene products. Appropriate cell lines or host systems can be chosen to ensure the correct modification and processing of the foreign protein expressed. To this end, eukaryotic host cells which possess the cellular machinery for proper processing of the primary transcript, glycosylation, and phosphorylation of the gene product may be used. Such mammalian host cells include but are not limited to CHO, VERY, BHK, Hela, COS, MDCK, 293, 3T3, W138, and in particular, breast cancer cell lines such as, for example, BT483, Hs578T, HTB2, BT20 and T47D, and normal mammary gland cell line such as, for example, CRL7030 and Hs578Bst.

[0204] For long-term, high-yield production of recombinant proteins, stable expression is preferred. For example, cell lines which stably express the antibody molecule may be engineered. Rather than using expression vectors which contain viral origins of replication, host cells can be transformed with DNA controlled by appropriate expression control elements (e.g., promoter, enhancer, sequences, transcription terminators, polyadenylation sites, etc.), and a selectable marker. Following the introduction of the foreign DNA, engineered cells may be allowed to grow for 1-2 days in an enriched media, and then are switched to a selective media. The selectable marker in the recombinant plasmid confers resistance to the selection and allows cells to stably integrate the plasmid into their chromosomes and grow to form foci which in turn can be cloned and expanded into cell lines. This method may advantageously be used to engineer cell lines which express the antibody molecule. Such engineered cell lines may be particularly useful in screening and evaluation of compounds that interact directly or indirectly with the antibody molecule.

[0205] A number of selection systems may be used, including but not limited to the herpes simplex virus thymidine kinase (Wigler et al., Cell 11:223 (1977)), hypoxanthine-guanine phosphoribosyltransferase (Szybalska & Szybalski, Proc. Natl. Acad. Sci. USA 48:202 (1992)), and adenine phosphoribosyltransferase (Lowy et al., Cell 22:817 (1980)) genes can be employed in tk-, hgprt- or aprt- cells, respectively. Also, antimetabolite resistance can be used as the basis of selection for the following genes: dhfr, which confers resistance to methotrexate (Wigler et al., Natl. Acad. Sci. USA 77:357 (1980); O'Hare et al., Proc. Natl. Acad. Sci. USA 78:1527 (1981)); gpt, which confers resistance to mycophenolic acid (Mulligan & Berg, Proc. Natl. Acad. Sci. USA 78:2072 (1981)); neo, which confers resistance to the aminoglycoside G-418 Clinical Pharmacy 12:488-505; Wu and Wu, Biotherapy 3:87-95 (1991); Tolstoshev, Ann. Rev. Pharmacol. Toxicol. 32:573-596 (1993); Mulligan, Science 260:926-932 (1993); and Morgan and Anderson, Ann. Rev. Biochem. 62:191-217 (1993); May, 1993, TIB TECH 11(5):155-215); and hygro, which confers resistance to hygromycin (Santerre et al., Gene 30:147 (1984)). Methods commonly known in the art of recombinant DNA technology may be routinely applied to select the desired recombinant clone, and such methods are described, for example, in Ausubel et al. (eds.), Current Protocols in Molecular Biology, John Wiley & Sons, NY (1993); Kriegler, Gene Transfer and Expression, A Laboratory Manual, Stockton Press, NY (1990); and in Chapters 12 and 13, Dracopoli et al. (eds), Current Protocols in Human Genetics, John Wiley & Sons, NY (1994); Colberre-Garapin et al., J. Mol. Biol. 150:1 (1981), which are incorporated by reference herein in their entireties.

[0206] The expression levels of an antibody molecule can be increased by vector amplification (for a review, see Bebbington and Hentschel, The use of vectors based on gene amplification for the expression of cloned genes in mammalian cells in DNA cloning, Vol.3. (Academic Press, New York, 1987)). When a marker in the vector system expressing antibody is amplifiable, increase in the level of inhibitor present in culture of host cell will increase the number of copies of the marker gene. Since the amplified region is associated with the antibody gene, production of the antibody will also increase (Crouse et al., Mol. Cell. Biol. 3:257 (1983)).

[0207] The host cell may be co-transfected with two expression vectors of the invention, the first vector encoding a heavy chain derived polypeptide and the second vector encoding a light chain derived polypeptide. The two vectors may contain identical selectable markers which enable equal expression of heavy and light chain polypeptides. Alternatively, a single vector may be used which encodes, and is capable of expressing, both heavy and light chain polypeptides. In such situations, the light chain should be placed before the heavy chain to avoid an excess of toxic free heavy chain (Proudfoot, Nature 322:52 (1986); Kohler, Proc. Natl. Acad. Sci. USA 77:2197 (1980)). The coding sequences for the heavy and light chains may comprise cDNA or genomic DNA.

[0208] Once an antibody molecule of the invention has been produced by an animal, chemically synthesized, or recombinantly expressed, it may be purified by any method known in the art for purification of an immunoglobulin molecule, for example, by chromatography (e.g., ion exchange, affinity, particularly by affinity for the specific antigen after Protein A, and sizing column chromatography), centrifugation, differential solubility, or by any other standard technique for the purification of proteins. In addition, the antibodies of the present invention or fragments thereof can be fused to heterologous polypeptide sequences described herein or otherwise known in the art, to facilitate purification.

[0209] The present invention encompasses antibodies recombinantly fused or chemically conjugated (including both covalently and non-covalently conjugations) to a polypeptide (or portion thereof, preferably at least 10, 20, 30, 40, 50, 60, 70, 80, 90 or 100 amino acids of the polypeptide) of the present invention to generate fusion proteins. The fusion does not necessarily need to be direct, but may occur through linker sequences. The antibodies may be specific for antigens other than polypeptides (or portion thereof, preferably at least 10, 20, 30, 40, 50, 60, 70, 80, 90 or 100 amino acids of the polypeptide) of the present invention. For example, antibodies may be used to target the polypeptides of the present invention to particular cell types, either in vitro or in vivo, by fusing or conjugating the polypeptides of the present invention to antibodies specific for particular cell surface receptors. Antibodies fused or conjugated to the polypeptides of the present invention may also be used in in vitro immunoassays and purification methods using methods known in the art. See e.g., Harbor et al., supra, and PCT publication WO 93/21232; EP 439,095; Naramura et al., Immunol. Lett. 39:91-99 (1994); U.S. Patent 5,474,981; Gillies et al., PNAS 89:1428-1432 (1992); Fell et al., J. Immunol. 146:2446-2452(1991), which are incorporated by reference in their entireties.

[0210] The present invention further includes compositions comprising the polypeptides of the present invention fused or conjugated to antibody domains other than the variable regions. For example, the polypeptides of the present invention may be fused or conjugated to an antibody Fc region, or portion thereof. The antibody portion fused to a polypeptide of the present invention may comprise the constant region, hinge region, CH1 domain, CH2 domain, and CH3 domain or any combination of whole domains or portions thereof. The polypeptides may also be fused or conjugated to the above antibody portions to form multimers. For example, Fc portions fused to the polypeptides of the present invention can form dimers through disulfide bonding between the Fc portions. Higher multimeric forms can be made by fusing the polypeptides to portions of IgA and IgM. Methods for fusing or conjugating the polypeptides of the present invention to antibody portions are known in the art. See, e.g., U.S. Pat. Nos. 5,336,603; 5,622,929; 5,359,046; 5,349,053; 5,447,851; 5,112,946; EP 307,434; EP 367,166; PCT publications WO 96/04388; WO 91/06570; Ashkenazi et al., Proc. Natl. Acad. Sci. USA 88:10535-10539 (1991); Zheng et al., J. Immunol. 154:5590-5600 (1995); and Vil et al., Proc. Natl. Acad. Sci. USA 89:11337-11341(1992) (said references incorporated by reference in their entireties).

[0211] As discussed, supra, the polypeptides corresponding to a polypeptide, polypeptide fragment, or a variant of SEQ ID NO:Y may be fused or conjugated to the above antibody portions to increase the in vivo half life of the polypeptides or for use in immunoassays using methods known in the art. Further, the polypeptides corresponding to SEQ ID NO:Y may be fused or conjugated to the above antibody portions to facilitate purification. One reported example describes chimeric proteins consisting of the first two domains of the human CD4-polypeptide and various domains of the constant regions of the heavy or light chains of mammalian immunoglobulins. (EP 394,827; Traunecker et al., Nature 331:84-86 (1988). The polypeptides of the present invention fused or conjugated to an antibody having disulfide-linked dimeric structures (due to the IgG) may also be more efficient in binding and neutralizing other molecules, than the monomeric secreted protein or protein fragment alone. (Fountoulakis et al., J. Biochem. 270:3958-3964 (1995)). In many cases, the Fc part in a fusion protein is beneficial in therapy and diagnosis, and thus can result in, for example, improved pharmacokinetic properties. (EP A 232,262). Alternatively, deleting the Fc part after the fusion protein has been expressed, detected, and purified, would be desired. For example, the Fc portion may hinder therapy and diagnosis if the fusion protein is used as an antigen for immunizations. In drug discovery, for example, human proteins, such as hIL-5, have been fused with Fc portions for the purpose of high-throughput screening assays to identify antagonists of hIL-5. (See, Bennett et al., J. Molecular Recognition 8:52-58 (1995); Johanson et al., J. Biol. Chem. 270:9459-9471 (1995).

[0212] Moreover, the antibodies or fragments thereof of the present invention can be fused to marker sequences, such as a peptide to facilitate purification. In preferred embodiments, the marker amino acid sequence is a hexa-histidine peptide, such as the tag provided in a pQE vector (QIAGEN, Inc., 9259 Eton Avenue, Chatsworth, Calif., 91311), among others, many of which are commercially available. As described in Gentz et al., Proc. Natl. Acad. Sci. USA 86:821-824 (1989), for instance, hexa-histidine provides for convenient purification of the fusion protein. Other peptide tags useful for purification include, but are not limited to, the “HA” tag, which corresponds to an epitope derived from the influenza hemagglutinin protein (Wilson et al., Cell 37:767 (1984)) and the “flag” tag.

[0213] The present invention further encompasses antibodies or fragments thereof conjugated to a diagnostic or therapeutic agent. The antibodies can be used diagnostically to, for example, monitor the development or progression of a tumor as part of a clinical testing procedure to, e.g., determine the efficacy of a given treatment regimen. Detection can be facilitated by coupling the antibody to a detectable substance. Examples of detectable substances include various enzymes, prosthetic groups, fluorescent materials, luminescent materials, bioluminescent materials, radioactive materials, positron emitting metals using various positron emission tomographies, and nonradioactive paramagnetic metal ions. The detectable substance may be coupled or conjugated either directly to the antibody (or fragment thereof) or indirectly, through an intermediate (such as, for example, a linker known in the art) using techniques known in the art. See, for example, U.S. Pat. No. 4,741,900 for metal ions which can be conjugated to antibodies for use as diagnostics according to the present invention. Examples of suitable enzymes include horseradish peroxidase, alkaline phosphatase, beta-galactosidase, or acetylcholinesterase; examples of suitable prosthetic group complexes include streptavidin/biotin and avidin/biotin; examples of suitable fluorescent materials include umbelliferone, fluorescein, fluorescein isothiocyanate, rhodamine, dichlorotriazinylamine fluorescein, dansyl chloride or phycoerythrin; an example of a luminescent material includes luminol; examples of bioluminescent materials include luciferase, luciferin, and aequorin; and examples of suitable radioactive material include 125I, 131I, 111In or 99Tc.

[0214] Further, an antibody or fragment thereof may be conjugated to a therapeutic moiety such as a cytotoxin, e.g., a cytostatic or cytocidal agent, a therapeutic agent or a radioactive metal ion, e.g., alpha-emitters such as, for example, 213Bi. A cytotoxin or cytotoxic agent includes any agent that is detrimental to cells. Examples include paclitaxol, cytochalasin B, gramicidin D, ethidium bromide, emetine, mitomycin, etoposide, tenoposide, vincristine, vinblastine, colchicin, doxorubicin, daunorubicin, dihydroxy anthracin dione, mitoxantrone, mithramycin, actinomycin D, 1-dehydrotestosterone, glucocorticoids, procaine, tetracaine, lidocaine, propranolol, and puromycin and analogs or homologs thereof. Therapeutic agents include, but are not limited to, antimetabolites (e.g., methotrexate, 6-mercaptopurine, 6-thioguanine, cytarabine, 5-fluorouracil decarbazine), alkylating agents (e.g., mechlorethamine, thioepa chlorambucil, melphalan, carmustine (BSNU) and lomustine (CCNU), cyclothosphamide, busulfan, dibromomannitol, streptozotocin, mitomycin C, and cis- dichlorodiamine platinum (II) (DDP) cisplatin), anthracyclines (e.g., daunorubicin (formerly daunomycin) and doxorubicin), antibiotics (e.g., dactinomycin (formerly actinomycin), bleomycin, mithramycin, and anthramycin (AMC)), and anti-mitotic agents (e.g., vincristine and vinblastine).

[0215] The conjugates of the invention can be used for modifying a given biological response, the therapeutic agent or drug moiety is not to be construed as limited to classical chemical therapeutic agents. For example, the drug moiety may be a protein or polypeptide possessing a desired biological activity. Such proteins may include, for example, a toxin such as abrin, ricin A, pseudomonas exotoxin, or diphtheria toxin; a protein such as tumor necrosis factor, a-interferon, β-interferon, nerve growth factor, platelet derived growth factor, tissue plasminogen activator, an apoptotic agent, e.g., TNF-alpha, TNF-beta, AIM I (See, International Publication No. WO 97/33899), AIM II (See, International Publication No. WO 97/34911), Fas Ligand (Takahashi et al., Int. Immunol., 6:1567-1574 (1994)), VEGI (See, International Publication No. WO 99/23105), a thrombotic agent or an anti-angiogenic agent, e.g., angiostatin or endostatin; or, biological response modifiers such as, for example, lymphokines, interleukin-1 (“IL-1”), interleukin-2 (“IL-2”), interleukin-6 (“IL-6”), granulocyte macrophage colony stimulating factor (“GM-CSF”), granulocyte colony stimulating factor (“G-CSF”), or other growth factors.

[0216] Antibodies may also be attached to solid supports, which are particularly useful for immunoassays or purification of the target antigen. Such solid supports include, but are not limited to, glass, cellulose, polyacrylamide, nylon, polystyrene, polyvinyl chloride or polypropylene.

[0217] Techniques for conjugating such therapeutic moiety to antibodies are well known, see, e.g., Arnon et al., “Monoclonal Antibodies For Immunotargeting Of Drugs In Cancer Therapy”, in Monoclonal Antibodies And Cancer Therapy, Reisfeld et al. (eds.), pp. 243-56 (Alan R. Liss, Inc. 1985); Hellstrom et al., “Antibodies For Drug Delivery”, in Controlled Drug Delivery (2nd Ed.), Robinson et al. (eds.), pp. 623-53 (Marcel Dekker, Inc. 1987); Thorpe, “Antibody Carriers Of Cytotoxic Agents In Cancer Therapy: A Review”, in Monoclonal Antibodies '84: Biological And Clinical Applications, Pinchera et al. (eds.), pp. 475-506 (1985); “Analysis, Results, And Future Prospective Of The Therapeutic Use Of Radiolabeled Antibody In Cancer Therapy”, in Monoclonal Antibodies For Cancer Detection And Therapy, Baldwin et al. (eds.), pp. 303-16 (Academic Press 1985), and Thorpe et al., “The Preparation And Cytotoxic Properties Of Antibody-Toxin Conjugates”, Immunol. Rev. 62:119-58 (1982).

[0218] Alternatively, an antibody can be conjugated to a second antibody to form an antibody heteroconjugate as described by Segal in U.S. Pat. No. 4,676,980, which is incorporated herein by reference in its entirety.

[0219] An antibody, with or without a therapeutic moiety conjugated to it, administered alone or in combination with cytotoxic factos) and/or cytokins) can be used as a therapeutic.

[0220] Immunophenotyping

[0221] The antibodies of the invention may be utilized for immunophenotyping of cell lines and biological samples. The translation product of the gene of the present invention may be useful as a cell specific marker, or more specifically as a cellular marker that is differentially expressed at various stages of differentiation and/or maturation of particular cell types. Monoclonal antibodies directed against a specific epitope, or combination of epitopes, will allow for the screening of cellular populations expressing the marker. Various techniques can be utilized using monoclonal antibodies to screen for cellular populations expressing the markes), and include magnetic separation using antibody-coated magnetic beads, “panning” with antibody attached to a solid matrix (i.e., plate), and flow cytometry (See, e.g., U.S. Pat. No. 5,985,660; and Morrison et al., Cell, 96:737-49 (1999)).

[0222] These techniques allow for the screening of particular populations of cells, such as might be found with hematological malignancies (i.e. minimal residual disease (MRD) in acute leukemic patients) and “non-self” cells in transplantations to prevent Graft-versus-Host Disease (GVHD). Alternatively, these techniques allow for the screening of hematopoietic stem and progenitor cells capable of undergoing proliferation and/or differentiation, as might be found in human umbilical cord blood.

[0223] Assays For Antibody Binding

[0224] The antibodies of the invention may be assayed for immunospecific binding by any method known in the art. The immunoassays which can be used include but are not limited to competitive and non-competitive assay systems using techniques such as western blots, radioimmunoassays, ELISA (enzyme linked immunosorbent assay), “sandwich” immunoassays, immunoprecipitation assays, precipitin reactions, gel diffusion precipitin reactions, immunodiffusion assays, agglutination assays, complement-fixation assays, immunoradiometric assays, fluorescent immunoassays, protein A immunoassays, to name but a few. Such assays are routine and well known in the art (see, e.g., Ausubel et al, eds, 1994, Current Protocols in Molecular Biology, Vol. 1, John Wiley & Sons, Inc., New York, which is incorporated by reference herein in its entirety). Exemplary immunoassays are described briefly below (but are not intended by way of limitation).

[0225] Immunoprecipitation protocols generally comprise lysing a population of cells in a lysis buffer such as RIPA buffer (1% NP-40 or Triton X-100, 1% sodium deoxycholate, 0.1% SDS, 0.15 M NaCl, 0.01 M sodium phosphate at pH 7.2, 1% Trasylol) supplemented with protein phosphatase and/or protease inhibitors (e.g., EDTA, PMSF, aprotinin, sodium vanadate), adding the antibody of interest to the cell lysate, incubating for a period of time (e.g., 1-4 hours) at 4° C., adding protein A and/or protein G sepharose beads to the cell lysate, incubating for about an hour or more at 4° C., washing the beads in lysis buffer and resuspending the beads in SDS/sample buffer. The ability of the antibody of interest to immunoprecipitate a particular antigen can be assessed by, e.g., western blot analysis. One of skill in the art would be knowledgeable as to the parameters that can be modified to increase the binding of the antibody to an antigen and decrease the background (e.g., pre-clearing the cell lysate with sepharose beads). For further discussion regarding immunoprecipitation protocols see, e.g., Ausubel et al, eds, 1994, Current Protocols in Molecular Biology, Vol. 1, John Wiley & Sons, Inc., New York at 10.16.1.

[0226] Western blot analysis generally comprises preparing protein samples, electrophoresis of the protein samples in a polyacrylamide gel (e.g., 8%-20% SDS-PAGE depending on the molecular weight of the antigen), transferring the protein sample from the polyacrylamide gel to a membrane such as nitrocellulose, PVDF or nylon, blocking the membrane in blocking solution (e.g., PBS with 3% BSA or non-fat milk), washing the membrane in washing buffer (e.g., PBS-Tween 20), blocking the membrane with primary antibody (the antibody of interest) diluted in blocking buffer, washing the membrane in washing buffer, blocking the membrane with a secondary antibody (which recognizes the primary antibody, e.g., an anti-human antibody) conjugated to an enzymatic substrate (e.g., horseradish peroxidase or alkaline phosphatase) or radioactive molecule (e.g., 32P or 125I) diluted in blocking buffer, washing the membrane in wash buffer, and detecting the presence of the antigen. One of skill in the art would be knowledgeable as to the parameters that can be modified to increase the signal detected and to reduce the background noise. For further discussion regarding western blot protocols see, e.g., Ausubel et al, eds, 1994, Current Protocols in Molecular Biology, Vol. 1, John Wiley & Sons, Inc., New York at 10.8.1.

[0227] ELISAs comprise preparing antigen, coating the well of a 96 well microtiter plate with the antigen, adding the antibody of interest conjugated to a detectable compound such as an enzymatic substrate (e.g., horseradish peroxidase or alkaline phosphatase) to the well and incubating for a period of time, and detecting the presence of the antigen. In ELISAs the antibody of interest does not have to be conjugated to a detectable compound; instead, a second antibody (which recognizes the antibody of interest) conjugated to a detectable compound may be added to the well. Further, instead of coating the well with the antigen, the antibody may be coated to the well. In this case, a second antibody conjugated to a detectable compound may be added following the addition of the antigen of interest to the coated well. One of skill in the art would be knowledgeable as to the parameters that can be modified to increase the signal detected as well as other variations of ELISAs known in the art. For further discussion regarding ELISAs see, e.g., Ausubel et al, eds, 1994, Current Protocols in Molecular Biology, Vol. 1, John Wiley & Sons, Inc., New York at 11.2.1.

[0228] The binding affinity of an antibody to an antigen and the off-rate of an antibody-antigen interaction can be determined by competitive binding assays. One example of a competitive binding assay is a radioimmunoassay comprising the incubation of labeled antigen (e.g., 3H or 125I) with the antibody of interest in the presence of increasing amounts of unlabeled antigen, and the detection of the antibody bound to the labeled antigen. The affinity of the antibody of interest for a particular antigen and the binding off-rates can be determined from the data by scatchard plot analysis. Competition with a second antibody can also be determined using radioimmunoassays. In this case, the antigen is incubated with antibody of interest conjugated to a labeled compound (e.g., 3H or 125I) in the presence of increasing amounts of an unlabeled second antibody.

[0229] Therapeutic Uses

[0230] The present invention is further directed to antibody-based therapies which involve administering antibodies of the invention to an animal, preferably a mammal, and most preferably a human, patient for treating one or more of the disclosed diseases, disorders, or conditions. Therapeutic compounds of the invention include, but are not limited to, antibodies of the invention (including fragments, analogs and derivatives thereof as described herein) and nucleic acids encoding antibodies of the invention (including fragments, analogs and derivatives thereof and anti-idiotypic antibodies as described herein). The antibodies of the invention can be used to treat, inhibit or prevent diseases, disorders or conditions associated with aberrant expression and/or activity of a polypeptide of the invention, including, but not limited to, any one or more of the diseases, disorders, or conditions described herein. The treatment and/or prevention of diseases, disorders, or conditions associated with aberrant expression and/or activity of a polypeptide of the invention includes, but is not limited to, alleviating symptoms associated with those diseases, disorders or conditions. Antibodies of the invention may be provided in pharmaceutically acceptable compositions as known in the art or as described herein.

[0231] A summary of the ways in which the antibodies of the present invention may be used therapeutically includes binding polynucleotides or polypeptides of the present invention locally or systemically in the body or by direct cytotoxicity of the antibody, e.g. as mediated by complement (CDC) or by effector cells (ADCC). Some of these approaches are described in more detail below. Armed with the teachings provided herein, one of ordinary skill in the art will know how to use the antibodies of the present invention for diagnostic, monitoring or therapeutic purposes without undue experimentation.

[0232] The antibodies of this invention may be advantageously utilized in combination with other monoclonal or chimeric antibodies, or with lymphokines or hematopoietic growth factors (such as, e.g., IL-2, IL-3 and IL-7), for example, which serve to increase the number or activity of effector cells which interact with the antibodies.

[0233] The antibodies of the invention may be administered alone or in combination with other types of treatments (e.g., radiation therapy, chemotherapy, hormonal therapy, immunotherapy and anti-tumor agents). Generally, administration of products of a species origin or species reactivity (in the case of antibodies) that is the same species as that of the patient is preferred. Thus, in a preferred embodiment, human antibodies, fragments derivatives, analogs, or nucleic acids, are administered to a human patient for therapy or prophylaxis.

[0234] It is preferred to use high affinity and/or potent in vivo inhibiting and/or neutralizing antibodies against polypeptides or polynucleotides of the present invention, fragments or regions thereof, for both immunoassays directed to and therapy of disorders related to polynucleotides or polypeptides, including fragments thereof, of the present invention. Such antibodies, fragments, or regions, will preferably have an affinity for polynucleotides or polypeptides of the invention, including fragments thereof. Preferred binding affinities include those with a dissociation constant or Kd less than 5×10⁻² M, 10⁻² M, 5×10⁻³ M, 10⁻³ M, 5×10⁴ M, 10⁻⁴ M, 5×10⁻⁵ M, 10⁻⁵ M, 5×10⁻⁶ M, 10⁻⁶ M, 5×10⁻⁷ M, 10⁻⁷ M, 5×10⁻⁸ M, 10⁻⁸ M, 5×10⁻⁹ M, 10⁻⁹ M, 5×10⁻¹⁰ M, 10⁻¹⁰ M, 5×10⁻¹¹ M, 10⁻¹¹ M, 5×10⁻¹² M, 10⁻¹² M 5×10⁻¹³ M, 10⁻¹³ M, 5×10⁻¹⁴ M, 10⁻¹⁴ M, 5×10⁻¹⁵ M, and 10⁻¹⁵ M.

[0235] Gene Therapy

[0236] In a specific embodiment, nucleic acids comprising sequences encoding antibodies or functional derivatives thereof, are administered to treat, inhibit or prevent a disease or disorder associated with aberrant expression and/or activity of a polypeptide of the invention, by way of gene therapy. Gene therapy refers to therapy performed by the administration to a subject of an expressed or expressible nucleic acid. In this embodiment of the invention, the nucleic acids produce their encoded protein that mediates a therapeutic effect.

[0237] Any of the methods for gene therapy available in the art can be used according to the present invention. Exemplary methods are described below.

[0238] For general reviews of the methods of gene therapy, see Goldspiel et al., Clinical Pharmacy 12:488-505 (1993); Wu and Wu, Biotherapy 3:87-95 (1991); Tolstoshev, Ann. Rev. Pharmacol. Toxicol. 32:573-596 (1993); Mulligan, Science 260:926-932 (1993); and Morgan and Anderson, Ann. Rev. Biochem. 62:191-217 (1993); May, TIBTECH 11(5):155-215 (1993). Methods commonly known in the art of recombinant DNA technology which can be used are described in Ausubel et al. (eds.), Current Protocols in Molecular Biology, John Wiley & Sons, NY (1993); and Kriegler, Gene Transfer and Expression, A Laboratory Manual, Stockton Press, NY (1990).

[0239] In a preferred aspect, the compound comprises nucleic acid sequences encoding an antibody, said nucleic acid sequences being part of expression vectors that express the antibody or fragments or chimeric proteins or heavy or light chains thereof in a suitable host. In particular, such nucleic acid sequences have promoters operably linked to the antibody coding region, said promoter being inducible or constitutive, and, optionally, tissue-specific. In another particular embodiment, nucleic acid molecules are used in which the antibody coding sequences and any other desired sequences are flanked by regions that promote homologous recombination at a desired site in the genome, thus providing for intrachromosomal expression of the antibody encoding nucleic acids (Koller and Smithies, Proc. Natl. Acad. Sci. USA 86:8932-8935 (1989); Zijlstra et al., Nature 342:435-438 (1989). In specific embodiments, the expressed antibody molecule is a single chain antibody; alternatively, the nucleic acid sequences include sequences encoding both the heavy and light chains, or fragments thereof, of the antibody.

[0240] Delivery of the nucleic acids into a patient may be either direct, in which case the patient is directly exposed to the nucleic acid or nucleic acid- carrying vectors, or indirect, in which case, cells are first transformed with the nucleic acids in vitro, then transplanted into the patient. These two approaches are known, respectively, as in vivo or ex vivo gene therapy.

[0241] In a specific embodiment, the nucleic acid sequences are directly administered in vivo, where it is expressed to produce the encoded product. This can be accomplished by any of numerous methods known in the art, e.g., by constructing them as part of an appropriate nucleic acid expression vector and administering it so that they become intracellular, e.g., by infection using defective or attenuated retrovirals or other viral vectors (see U.S. Pat. No. 4,980,286), or by direct injection of naked DNA, or by use of microparticle bombardment (e.g., a gene gun; Biolistic, Dupont), or coating with lipids or cell-surface receptors or transfecting agents, encapsulation in liposomes, microparticles, or microcapsules, or by administering them in linkage to a peptide which is known to enter the nucleus, by administering it in linkage to a ligand subject to receptor-mediated endocytosis (see, e.g., Wu and Wu, J. Biol. Chem. 262:4429-4432 (1987)) (which can be used to target cell types specifically expressing the receptors), etc. In another embodiment, nucleic acid-ligand complexes can be formed in which the ligand comprises a fusogenic viral peptide to disrupt endosomes, allowing the nucleic acid to avoid lysosomal degradation. In yet another embodiment, the nucleic acid can be targeted in vivo for cell specific uptake and expression, by targeting a specific receptor (see, e.g., PCT Publications WO 92/06180; WO 92/22635; WO92/20316; WO93/14188, WO 93/20221). Alternatively, the nucleic acid can be introduced intracellularly and incorporated within host cell DNA for expression, by homologous recombination (Koller and Smithies, Proc. Natl. Acad. Sci. USA 86:8932-8935 (1989); Zijlstra et al., Nature 342:435-438 (1989)).

[0242] In a specific embodiment, viral vectors that contains nucleic acid sequences encoding an antibody of the invention are used. For example, a retroviral vector can be used (see Miller et al., Meth. Enzymol. 217:581-599 (1993)). These retroviral vectors contain the components necessary for the correct packaging of the viral genome and integration into the host cell DNA. The nucleic acid sequences encoding the antibody to be used in gene therapy are cloned into one or more vectors, which facilitates delivery of the gene into a patient. More detail about retroviral vectors can be found in Boesen et al., Biotherapy 6:291-302 (1994), which describes the use of a retroviral vector to deliver the mdr1 gene to hematopoietic stem cells in order to make the stem cells more resistant to chemotherapy. Other references illustrating the use of retroviral vectors in gene therapy are: Clowes et al., J. Clin. Invest. 93:644-651 (1994); Kiem et al., Blood 83:1467-1473 (1994); Salmons and Gunzberg, Human Gene Therapy 4:129-141 (1993); and Grossman and Wilson, Curr. Opin. in Genetics and Devel. 3:110-114 (1993).

[0243] Adenoviruses are other viral vectors that can be used in gene therapy. Adenoviruses are especially attractive vehicles for delivering genes to respiratory epithelia. Adenoviruses naturally infect respiratory epithelia where they cause a mild disease. Other targets for adenovirus-based delivery systems are liver, the central nervous system, endothelial cells, and muscle. Adenoviruses have the advantage of being capable of infecting non-dividing cells. Kozarsky and Wilson, Current Opinion in Genetics and Development 3:499-503 (1993) present a review of adenovirus-based gene therapy. Bout et al., Human Gene Therapy 5:3-10 (1994) demonstrated the use of adenovirus vectors to transfer genes to the respiratory epithelia of rhesus monkeys. Other instances of the use of adenoviruses in gene therapy can be found in Rosenfeld et al., Science 252:431-434 (1991); Rosenfeld et al., Cell 68:143-155 (1992); Mastrangeli et al., J. Clin. Invest. 91:225-234 (1993); PCT Publication WO94/12649; and Wang, et al., Gene Therapy 2:775-783 (1995). In a preferred embodiment, adenovirus vectors are used.

[0244] Adeno-associated virus (AAV) has also been proposed for use in gene therapy (Walsh et al., Proc. Soc. Exp. Biol. Med. 204:289-300 (1993); U.S. Patent No. 5,436,146).

[0245] Another approach to gene therapy involves transferring a gene to cells in tissue culture by such methods as electroporation, lipofection, calcium phosphate mediated transfection, or viral infection. Usually, the method of transfer includes the transfer of a selectable marker to the cells. The cells are then placed under selection to isolate those cells that have taken up and are expressing the transferred gene. Those cells are then delivered to a patient.

[0246] In this embodiment, the nucleic acid is introduced into a cell prior to administration in vivo of the resulting recombinant cell. Such introduction can be carried out by any method known in the art, including but not limited to transfection, electroporation, microinjection, infection with a viral or bacteriophage vector containing the nucleic acid sequences, cell fusion, chromosome-mediated gene transfer, microcell-mediated gene transfer, spheroplast fusion, etc. Numerous techniques are known in the art for the introduction of foreign genes into cells (see, e.g., Loeffler and Behr, Meth. Enzymol. 217:599-618 (1993); Cohen et al., Meth. Enzymol. 217:618-644 (1993); Cline, Pharmac. Ther. 29:69-92m (1985) and may be used in accordance with the present invention, provided that the necessary developmental and physiological functions of the recipient cells are not disrupted. The technique should provide for the stable transfer of the nucleic acid to the cell, so that the nucleic acid is expressible by the cell and preferably heritable and expressible by its cell progeny.

[0247] The resulting recombinant cells can be delivered to a patient by various methods known in the art. Recombinant blood cells (e.g., hematopoietic stem or progenitor cells) are preferably administered intravenously. The amount of cells envisioned for use depends on the desired effect, patient state, etc., and can be determined by one skilled in the art.

[0248] Cells into which a nucleic acid can be introduced for purposes of gene therapy encompass any desired, available cell type, and include but are not limited to epithelial cells, endothelial cells, keratinocytes, fibroblasts, muscle cells, hepatocytes; blood cells such as Tlymphocytes, Blymphocytes, monocytes, macrophages, neutrophils, eosinophils, megakaryocytes, granulocytes; various stem or progenitor cells, in particular hematopoietic stem or progenitor cells, e.g., as obtained from bone marrow, umbilical cord blood, peripheral blood, fetal liver, etc.

[0249] In a preferred embodiment, the cell used for gene therapy is autologous to the patient.

[0250] In an embodiment in which recombinant cells are used in gene therapy, nucleic acid sequences encoding an antibody are introduced into the cells such that they are expressible by the cells or their progeny, and the recombinant cells are then administered in vivo for therapeutic effect. In a specific embodiment, stem or progenitor cells are used. Any stem and/or progenitor cells which can be isolated and maintained in vitro can potentially be used in accordance with this embodiment of the present invention (see e.g. PCT Publication WO 94/08598; Stemple and Anderson, Cell 71:973-985 (1992); Rheinwald, Meth. Cell Bio. 21A:229 (1980); and Pittelkow and Scott, Mayo Clinic Proc. 61:771 (1986)).

[0251] In a specific embodiment, the nucleic acid to be introduced for purposes of gene therapy comprises an inducible promoter operably linked to the coding region, such that expression of the nucleic acid is controllable by controlling the presence or absence of the appropriate inducer of transcription. Demonstration of Therapeutic or Prophylactic Activity

[0252] The compounds or pharmaceutical compositions of the invention are preferably tested in vitro, and then in vivo for the desired therapeutic or prophylactic activity, prior to use in humans. For example, in vitro assays to demonstrate the therapeutic or prophylactic utility of a compound or pharmaceutical composition include, the effect of a compound on a cell line or a patient tissue sample. The effect of the compound or composition on the cell line and/or tissue sample can be determined utilizing techniques known to those of skill in the art including, but not limited to, rosette formation assays and cell lysis assays. In accordance with the invention, in vitro assays which can be used to determine whether administration of a specific compound is indicated, include in vitro cell culture assays in which a patient tissue sample is grown in culture, and exposed to or otherwise administered a compound, and the effect of such compound upon the tissue sample is observed.

[0253] Therapeutic/Prophylactic Administration and Composition

[0254] The invention provides methods of treatment, inhibition and prophylaxis by administration to a subject of an effective amount of a compound or pharmaceutical composition of the invention, preferably a polypeptide or antibody of the invention. In a preferred aspect, the compound is substantially purified (e.g., substantially free from substances that limit its effect or produce undesired side-effects). The subject is preferably an animal, including but not limited to animals such as cows, pigs, horses, chickens, cats, dogs, etc., and is preferably a mammal, and most preferably human.

[0255] Formulations and methods of administration that can be employed when the compound comprises a nucleic acid or an immunoglobulin are described above; additional appropriate formulations and routes of administration can be selected from among those described herein below.

[0256] Various delivery systems are known and can be used to administer a compound of the invention, e.g., encapsulation in liposomes, microparticles, microcapsules, recombinant cells capable of expressing the compound, receptor-mediated endocytosis (see, e.g., Wu and Wu, J. Biol. Chem. 262:4429-4432 (1987)), construction of a nucleic acid as part of a retroviral or other vector, etc. Methods of introduction include but are not limited to intradermal, intramuscular, intraperitoneal, intravenous, subcutaneous, intranasal, epidural, and oral routes. The compounds or compositions may be administered by any convenient route, for example by infusion or bolus injection, by absorption through epithelial or mucocutaneous linings (e.g., oral mucosa, rectal and intestinal mucosa, etc.) and may be administered together with other biologically active agents. Administration can be systemic or local. In addition, it may be desirable to introduce the pharmaceutical compounds or compositions of the invention into the central nervous system by any suitable route, including intraventricular and intrathecal injection; intraventricular injection may be facilitated by an intraventricular catheter, for example, attached to a reservoir, such as an Ommaya reservoir. Pulmonary administration can also be employed, e.g., by use of an inhaler or nebulizer, and formulation with an aerosolizing agent.

[0257] In a specific embodiment, it may be desirable to administer the pharmaceutical compounds or compositions of the invention locally to the area in need of treatment; this may be achieved by, for example, and not by way of limitation, local infusion during surgery, topical application, e.g., in conjunction with a wound dressing after surgery, by injection, by means of a catheter, by means of a suppository, or by means of an implant, said implant being of a porous, non-porous, or gelatinous material, including membranes, such as sialastic membranes, or fibers. Preferably, when administering a protein, including an antibody, of the invention, care must be taken to use materials to which the protein does not absorb.

[0258] In another embodiment, the compound or composition can be delivered in a vesicle, in particular a liposome (see Langer, Science 249:1527-1533 (1990); Treat et al., in Liposomes in the Therapy of Infectious Disease and Cancer, Lopez-Berestein and Fidler (eds.), Liss, New York, pp. 353-365 (1989); Lopez-Berestein, ibid., pp. 317-327; see generally ibid.)

[0259] In yet another embodiment, the compound or composition can be delivered in a controlled release system. In one embodiment, a pump may be used (see Langer, supra; Sefton, CRC Crit. Ref. Biomed. Eng. 14:201 (1987); Buchwald et al., Surgery 88:507 (1980); Saudek et al., N. Engl. J. Med. 321:574 (1989)). In another embodiment, polymeric materials can be used (see Medical Applications of Controlled Release, Langer and Wise (eds.), CRC Pres., Boca Raton, Fla. (1974); Controlled Drug Bioavailability, Drug Product Design and Performance, Smolen and Ball (eds.), Wiley, New York (1984); Ranger and Peppas, J., Macromol. Sci. Rev. Macromol. Chem. 23:61 (1983); see also Levy et al., Science 228:190 (1985); During et al., Ann. Neurol. 25:351 (1989); Howard et al., J.Neurosurg. 71:105 (1989)). In yet another embodiment, a controlled release system can be placed in proximity of the therapeutic target, i.e., the brain, thus requiring only a fraction of the systemic dose (see, e.g., Goodson, in Medical Applications of Controlled Release, supra, vol. 2, pp. 115-138 (1984)).

[0260] Other controlled release systems are discussed in the review by Langer (Science 249:1527-1533 (1990)).

[0261] In a specific embodiment where the compound of the invention is a nucleic acid encoding a protein, the nucleic acid can be administered in vivo to promote expression of its encoded protein, by constructing it as part of an appropriate nucleic acid expression vector and administering it so that it becomes intracellular, e.g., by use of a retroviral vector (see U.S. Pat. No. 4,980,286), or by direct injection, or by use of microparticle bombardment (e.g., a gene gun; Biolistic, Dupont), or coating with lipids or cell-surface receptors or transfecting agents, or by administering it in linkage to a homeobox-like peptide which is known to enter the nucleus (see e.g., Joliot et al., Proc. Natl. Acad. Sci. USA 88:1864-1868 (1991)), etc. Alternatively, a nucleic acid can be introduced intracellularly and incorporated within host cell DNA for expression, by homologous recombination.

[0262] The present invention also provides pharmaceutical compositions. Such compositions comprise a therapeutically effective amount of a compound, and a pharmaceutically acceptable carrier. In a specific embodiment, the term “pharmaceutically acceptable” means approved by a regulatory agency of the Federal or a state government or listed in the U.S. Pharmacopeia or other generally recognized pharmacopeia for use in animals, and more particularly in humans. The term “carrier” refers to a diluent, adjuvant, excipient, or vehicle with which the therapeutic is administered. Such pharmaceutical carriers can be sterile liquids, such as water and oils, including those of petroleum, animal, vegetable or synthetic origin, such as peanut oil, soybean oil, mineral oil, sesame oil and the like. Water is a preferred carrier when the pharmaceutical composition is administered intravenously. Saline solutions and aqueous dextrose and glycerol solutions can also be employed as liquid carriers, particularly for injectable solutions. Suitable pharmaceutical excipients include starch, glucose, lactose, sucrose, gelatin, malt, rice, flour, chalk, silica gel, sodium stearate, glycerol monostearate, talc, sodium chloride, dried skim milk, glycerol, propylene, glycol, water, ethanol and the like. The composition, if desired, can also contain minor amounts of wetting or emulsifying agents, or pH buffering agents. These compositions can take the form of solutions, suspensions, emulsion, tablets, pills, capsules, powders, sustained-release formulations and the like. The composition can be formulated as a suppository, with traditional binders and carriers such as triglycerides. Oral formulation can include standard carriers such as pharmaceutical grades of mannitol, lactose, starch, magnesium stearate, sodium saccharine, cellulose, magnesium carbonate, etc. Examples of suitable pharmaceutical carriers are described in “Remington's Pharmaceutical Sciences” by E. W. Martin. Such compositions will contain a therapeutically effective amount of the compound, preferably in purified form, together with a suitable amount of carrier so as to provide the form for proper administration to the patient. The formulation should suit the mode of administration.

[0263] In a preferred embodiment, the composition is formulated in accordance with routine procedures as a pharmaceutical composition adapted for intravenous administration to human beings. Typically, compositions for intravenous administration are solutions in sterile isotonic aqueous buffer. Where necessary, the composition may also include a solubilizing agent and a local anesthetic such as lignocaine to ease pain at the site of the injection. Generally, the ingredients are supplied either separately or mixed together in unit dosage form, for example, as a dry lyophilized powder or water free concentrate in a hermetically sealed container such as an ampoule or sachette indicating the quantity of active agent. Where the composition is to be administered by infusion, it can be dispensed with an infusion bottle containing sterile pharmaceutical grade water or saline. Where the composition is administered by injection, an ampoule of sterile water for injection or saline can be provided so that the ingredients may be mixed prior to administration.

[0264] The compounds of the invention can be formulated as neutral or salt forms. Pharmaceutically acceptable salts include those formed with anions such as those derived from hydrochloric, phosphoric, acetic, oxalic, tartaric acids, etc., and those formed with cations such as those derived from sodium, potassium, ammonium, calcium, ferric hydroxides, isopropylamine, triethylamine, 2-ethylamino ethanol, histidine, procaine, etc.

[0265] The amount of the compound of the invention which will be effective in the treatment, inhibition and prevention of a disease or disorder associated with aberrant expression and/or activity of a polypeptide of the invention can be determined by standard clinical techniques. In addition, in vitro assays may optionally be employed to help identify optimal dosage ranges. The precise dose to be employed in the formulation will also depend on the route of administration, and the seriousness of the disease or disorder, and should be decided according to the judgment of the practitioner and each patient's circumstances. Effective doses may be extrapolated from dose-response curves derived from in vitro or animal model test systems.

[0266] For antibodies, the dosage administered to a patient is typically 0.1 mg/kg to 100 mg/kg of the patient's body weight. Preferably, the dosage administered to a patient is between 0.1 mg/kg and 20 mg/kg of the patient's body weight, more preferably 1 mg/kg to 10 mg/kg of the patient's body weight. Generally, human antibodies have a longer half-life within the human body than antibodies from other species due to the immune response to the foreign polypeptides. Thus, lower dosages of human antibodies and less frequent administration is often possible. Further, the dosage and frequency of administration of antibodies of the invention may be reduced by enhancing uptake and tissue penetration (e.g., into the brain) of the antibodies by modifications such as, for example, lipidation.

[0267] The invention also provides a pharmaceutical pack or kit comprising one or more containers filled with one or more of the ingredients of the pharmaceutical compositions of the invention. Optionally associated with such containes) can be a notice in the form prescribed by a governmental agency regulating the manufacture, use or sale of pharmaceuticals or biological products, which notice reflects approval by the agency of manufacture, use or sale for human administration. Diagnosis and Imaging

[0268] Labeled antibodies, and derivatives and analogs thereof, which specifically bind to a polypeptide of interest can be used for diagnostic purposes to detect, diagnose, or monitor diseases, disorders, and/or conditions associated with the aberrant expression and/or activity of a polypeptide of the invention. The invention provides for the detection of aberrant expression of a polypeptide of interest, comprising (a) assaying the expression of the polypeptide of interest in cells or body fluid of an individual using one or more antibodies specific to the polypeptide interest and (b) comparing the level of gene expression with a standard gene expression level, whereby an increase or decrease in the assayed polypeptide gene expression level compared to the standard expression level is indicative of aberrant expression.

[0269] The invention provides a diagnostic assay for diagnosing a disorder, comprising (a) assaying the expression of the polypeptide of interest in cells or body fluid of an individual using one or more antibodies specific to the polypeptide interest and (b) comparing the level of gene expression with a standard gene expression level, whereby an increase or decrease in the assayed polypeptide gene expression level compared to the standard expression level is indicative of a particular disorder. With respect to cancer, the presence of a relatively high amount of transcript in biopsied tissue from an individual may indicate a predisposition for the development of the disease, or may provide a means for detecting the disease prior to the appearance of actual clinical symptoms. A more definitive diagnosis of this type may allow health professionals to employ preventative measures or aggressive treatment earlier thereby preventing the development or further progression of the cancer.

[0270] Antibodies of the invention can be used to assay protein levels in a biological sample using classical immunohistological methods known to those of skill in the art (e.g., see Jalkanen, et al., J. Cell. Biol. 101:976-985 (1985); Jalkanen, et al., J. Cell . Biol. 105:3087-3096 (1987)). Other antibody-based methods useful for detecting protein gene expression include immunoassays, such as the enzyme linked immunosorbent assay (ELISA) and the radioimmunoassay (RIA). Suitable antibody assay labels are known in the art and include enzyme labels, such as, glucose oxidase; radioisotopes, such as iodine (1251, 1211), carbon (14C), sulfur (35S), tritium (3H), indium (1121n), and technetium (99Tc); luminescent labels, such as luminol; and fluorescent labels, such as fluorescein and rhodamine, and biotin.

[0271] One aspect of the invention is the detection and diagnosis of a disease or disorder associated with aberrant expression of a polypeptide of interest in an animal, preferably a mammal and most preferably a human. In one embodiment, diagnosis comprises: a) administering (for example, parenterally, subcutaneously, or intraperitoneally) to a subject an effective amount of a labeled molecule which specifically binds to the polypeptide of interest; b) waiting for a time interval following the administering for permitting the labeled molecule to preferentially concentrate at sites in the subject where the polypeptide is expressed (and for unbound labeled molecule to be cleared to background level); c) determining background level; and d) detecting the labeled molecule in the subject, such that detection of labeled molecule above the background level indicates that the subject has a particular disease or disorder associated with aberrant expression of the polypeptide of interest. Background level can be determined by various methods including, comparing the amount of labeled molecule detected to a standard value previously determined for a particular system.

[0272] It will be understood in the art that the size of the subject and the imaging system used will determine the quantity of imaging moiety needed to produce diagnostic images. In the case of a radioisotope moiety, for a human subject, the quantity of radioactivity injected will normally range from about 5 to 20 millicuries of 99mTc. The labeled antibody or antibody fragment will then preferentially accumulate at the location of cells which contain the specific protein. In vivo tumor imaging is described in S.W. Burchiel et al., “Immunopharmacokinetics of Radiolabeled Antibodies and Their Fragments.” (Chapter 13 in Tumor Imaging: The Radiochemical Detection of Cancer, S.W. Burchiel and B. A. Rhodes, eds., Masson Publishing Inc. (1982).

[0273] Depending on several variables, including the type of label used and the mode of administration, the time interval following the administration for permitting the labeled molecule to preferentially concentrate at sites in the subject and for unbound labeled molecule to be cleared to background level is 6 to 48 hours or 6 to 24 hours or 6 to 12 hours. In another embodiment the time interval following administration is 5 to 20 days or 5 to 10 days.

[0274] In an embodiment, monitoring of the disease or disorder is carried out by repeating the method for diagnosing the disease or disease, for example, one month after initial diagnosis, six months after initial diagnosis, one year after initial diagnosis, etc.

[0275] Presence of the labeled molecule can be detected in the patient using methods known in the art for in vivo scanning. These methods depend upon the type of label used. Skilled artisans will be able to determine the appropriate method for detecting a particular label. Methods and devices that may be used in the diagnostic methods of the invention include, but are not limited to, computed tomography (CT), whole body scan such as position emission tomography (PET), magnetic resonance imaging (MRI), and sonography.

[0276] In a specific embodiment, the molecule is labeled with a radioisotope and is detected in the patient using a radiation responsive surgical instrument (Thurston et al., U.S. Pat. No. 5,441,050). In another embodiment, the molecule is labeled with a fluorescent compound and is detected in the patient using a fluorescence responsive scanning instrument. In another embodiment, the molecule is labeled with a positron emitting metal and is detected in the patent using positron emission-tomography. In yet another embodiment, the molecule is labeled with a paramagnetic label and is detected in a patient using magnetic resonance imaging (MRI). Kits

[0277] The present invention provides kits that can be used in the above methods. In one embodiment, a kit comprises an antibody of the invention, preferably a purified antibody, in one or more containers. In a specific embodiment, the kits of the present invention contain a substantially isolated polypeptide comprising an epitope which is specifically immunoreactive with an antibody included in the kit. Preferably, the kits of the present invention further comprise a control antibody which does not react with the polypeptide of interest. In another specific embodiment, the kits of the present invention contain a means for detecting the binding of an antibody to a polypeptide of interest (e.g., the antibody may be conjugated to a detectable substrate such as a fluorescent compound, an enzymatic substrate, a radioactive compound or a luminescent compound, or a second antibody which recognizes the first antibody may be conjugated to a detectable substrate).

[0278] In another specific embodiment of the present invention, the kit is a diagnostic kit for use in screening serum containing antibodies specific against proliferative and/or cancerous polynucleotides and polypeptides. Such a kit may include a control antibody that does not react with the polypeptide of interest. Such a kit may include a substantially isolated polypeptide antigen comprising an epitope which is specifically immunoreactive with at least one anti-polypeptide antigen antibody. Further, such a kit includes means for detecting the binding of said antibody to the antigen (e.g., the antibody may be conjugated to a fluorescent compound such as fluorescein or rhodamine which can be detected by flow cytometry). In specific embodiments, the kit may include a recombinantly produced or chemically synthesized polypeptide antigen. The polypeptide antigen of the kit may also be attached to a solid support.

[0279] In a more specific embodiment the detecting means of the above-described kit includes a solid support to which said polypeptide antigen is attached. Such a kit may also include a non-attached reporter-labeled anti-human antibody. In this embodiment, binding of the antibody to the polypeptide antigen can be detected by binding of the said reporter-labeled antibody.

[0280] In an additional embodiment, the invention includes a diagnostic kit for use in screening serum containing antigens of the polypeptide of the invention. The diagnostic kit includes a substantially isolated antibody specifically immunoreactive with polypeptide or polynucleotide antigens, and means for detecting the binding of the polynucleotide or polypeptide antigen to the antibody. In one embodiment, the antibody is attached to a solid support. In a specific embodiment, the antibody may be a monoclonal antibody. The detecting means of the kit may include a second, labeled monoclonal antibody. Alternatively, or in addition, the detecting means may include a labeled, competing antigen.

[0281] In one diagnostic configuration, test serum is reacted with a solid phase reagent having a surface-bound antigen obtained by the methods of the present invention. After binding with specific antigen antibody to the reagent and removing unbound serum components by washing, the reagent is reacted with reporter-labeled anti-human antibody to bind reporter to the reagent in proportion to the amount of bound anti-antigen antibody on the solid support. The reagent is again washed to remove unbound labeled antibody, and the amount of reporter associated with the reagent is determined. Typically, the reporter is an enzyme which is detected by incubating the solid phase in the presence of a suitable fluorometric, luminescent or colorimetric substrate (Sigma, St. Louis, MO).

[0282] The solid surface reagent in the above assay is prepared by known techniques for attaching protein material to solid support material, such as polymeric beads, dip sticks, 96-well plate or filter material. These attachment methods generally include non-specific adsorption of the protein to the support or covalent attachment of the protein, typically through a free amine group, to a chemically reactive group on the solid support, such as an activated carboxyl, hydroxyl, or aldehyde group. Alternatively, streptavidin coated plates can be used in conjunction with biotinylated antiges).

[0283] Thus, the invention provides an assay system or kit for carrying out this diagnostic method. The kit generally includes a support with surface- bound recombinant antigens, and a reporter-labeled anti-human antibody for detecting surface-bound anti-antigen antibody. Uses of the Polynucleotides

[0284] Each of the polynucleotides identified herein can be used in numerous ways as reagents. The following description should be considered exemplary and utilizes known techniques.

[0285] The lung cancer antigen polynucleotides of the present invention are useful for chromosome identification. There exists an ongoing need to identify new chromosome markers, since few chromosome marking reagents, based on actual sequence data (repeat polymorphisms), are presently available. Each sequence is specifically targeted to and can hybridize with a particular location on an individual human chromosome, thus each polynucleotide of the present invention can routinely be used as a chromosome marker using techniques known in the art.

[0286] Briefly, sequences can be mapped to chromosomes by preparing PCR primers (preferably at least 15 bp (e.g., 15-25 bp) from the sequences shown in SEQ ID NO:X, or the complement thereto. Primers can optionally be selected using computer analysis so that primers do not span more than one predicted exon in the genomic DNA. These primers are then used for PCR screening of somatic cell hybrids containing individual human chromosomes. Only those hybrids containing the human gene corresponding to SEQ ID NO:X will yield an amplified fragment.

[0287] Similarly, somatic hybrids provide a rapid method of PCR mapping the polynucleotides to particular chromosomes. Three or more clones can be assigned per day using a single thermal cycler. Moreover, sublocalization of the polynucleotides can be achieved with panels of specific chromosome fragments. Other gene mapping strategies that can be used include in situ hybridization, prescreening with labeled flow-sorted chromosomes, preselection by hybridization to construct chromosome specific-cDNA libraries, and computer mapping techniques (See, e.g., Shuler, Trends Biotechnol 16:456-459 (1998) which is hereby incorporated by reference in its entirety).

[0288] Precise chromosomal location of the polynucleotides can also be achieved using fluorescence in situ hybridization (FISH) of a metaphase chromosomal spread. This technique uses polynucleotides as short as 500 or 600 bases; however, polynucleotides 2,000-4,000 bp are preferred. For a review of this technique, see Verma et al., “Human Chromosomes: a Manual of Basic Techniques,” Pergamon Press, New York (1988).

[0289] For chromosome mapping, the polynucleotides can be used individually (to mark a single chromosome or a single site on that chromosome) or in panels (for marking multiple sites and/or multiple chromosomes).

[0290] Thus, the present invention also provides a method for chromosomal localization which involves (a) preparing PCR primers from the polynucleotide sequences in Table 3 and SEQ ID NO:X and (b) screening somatic cell hybrids containing individual chromosomes.

[0291] The polynucleotides of the present invention would likewise be useful for radiation hybrid mapping, HAPPY mapping, and long range restriction mapping. For a review of these techniques and others known in the art, see, e.g. Dear, “Genome Mapping: A Practical Approach,” IRL Press at Oxford University Press, London (1997); Aydin, J. Mol. Med. 77:691-694 (1999); Hacia et al., Mol. Psychiatry 3:483-492 (1998); Herrick et al., Chromosome Res. 7:409-423 (1999); Hamilton et al., Methods Cell Biol. 62:265-280 (2000); and/or Ott, J. Hered. 90:68-70 (1999) each of which is hereby incorporated by reference in its entirety.

[0292] Once a polynucleotide has been mapped to a precise chromosomal location, the physical position of the polynucleotide can be used in linkage analysis. Linkage analysis establishes coinheritance between a chromosomal location and presentation of a particular disease. (Disease mapping data are found, for example, in V. McKusick, Mendelian Inheritance in Man (available on line through Johns Hopkins University Welch Medical Library).) Assuming 1 megabase mapping resolution and one gene per 20 kb, a cDNA precisely localized to a chromosomal region associated with the disease could be one of 50-500 potential causative genes.

[0293] Thus, once coinheritance is established, differences in a polynucleotide of the invention and the corresponding gene between affected and unaffected individuals can be examined. First, visible structural alterations in the chromosomes, such as deletions or translocations, are examined in chromosome spreads or by PCR. If no structural alterations exist, the presence of point mutations are ascertained. Mutations observed in some or all affected individuals, but not in normal individuals, indicates that the mutation may cause the disease. However, complete sequencing of the polypeptide and the corresponding gene from several normal individuals is required to distinguish the mutation from a polymorphism. If a new polymorphism is identified, this polymorphic polypeptide can be used for further linkage analysis.

[0294] Furthermore, increased or decreased expression of the gene in affected individuals as compared to unaffected individuals can be assessed using the polynucleotides of the invention. Any of these alterations (altered expression, chromosomal rearrangement, or mutation) can be used as a diagnostic or prognostic marker.

[0295] Thus, the invention provides a method of detecting increased or decreased expression levels of the lung cancer polynucleotides in affected individuals as compared to unaffected individuals using polynucleotides of the present invention and techniques known in the art, including but not limited to the method described in Example 11. Any of these alterations (altered expression, chromosomal rearrangement, or mutation) can be used as a diagnostic or prognostic marker.

[0296] Thus, the invention also provides a diagnostic method useful during diagnosis of a lung related disorder, including lung cancer, involving measuring the expression level of lung cancer polynucleotides in lung tissue or other cells or body fluid from an individual and comparing the measured gene expression level with a standard lung cancer polynucleotide expression level, whereby an increase or decrease in the gene expression level compared to the standard is indicative of a lung related disorder.

[0297] In still another embodiment, the invention includes a kit for analyzing samples for the presence of proliferative and/or cancerous polynucleotides derived from a test subject. In a general embodiment, the kit includes at least one polynucleotide probe containing a nucleotide sequence that will specifically hybridize with a polynucleotide of the invention and a suitable container. In a specific embodiment, the kit includes two polynucleotide probes defining an internal region of the polynucleotide of the invention, where each probe has one strand containing a 31′mer-end internal to the region. In a further embodiment, the probes may be useful as primers for polymerase chain reaction amplification.

[0298] Where a diagnosis of a lung related disorder, including, for example, diagnosis of a tumor, has already been made according to conventional methods, the present invention is useful as a prognostic indicator, whereby patients exhibiting enhanced or depressed lung cancer polynucleotide expression will experience a worse clinical outcome relative to patients expressing the gene at a level nearer the standard level.

[0299] By “measuring the expression level of lung cancer polynucleotides” is intended qualitatively or quantitatively measuring or estimating the level of the lung cancer polypeptide or the level of the mRNA encoding the lung cancer polypeptide in a first biological sample either directly (e.g., by determining or estimating absolute protein level or MRNA level) or relatively (e.g., by comparing to the lung cancer polypeptide level or MRNA level in a second biological sample). Preferably, the lung cancer polypeptide level or mRNA level in the first biological sample is measured or estimated and compared to a standard lung cancer polypeptide level or MRNA level, the standard being taken from a second biological sample obtained from an individual not having the lung related disorder or being determined by averaging levels from a population of individuals not having a lung related disorder. As will be appreciated in the art, once a standard lung cancer polypeptide level or MRNA level is known, it can be used repeatedly as a standard for comparison.

[0300] By “biological sample” is intended any biological sample obtained from an individual, body fluid, cell line, tissue culture, or other source which contains lung cancer polypeptide or the corresponding MRNA. As indicated, biological samples include body fluids (such as sputum, lymph, sera, plasma, urine, synovial fluid and spinal fluid) which contain the lung cancer polypeptide, lung tissue, and other tissue sources found to express the lung cancer polypeptide. Methods for obtaining tissue biopsies and body fluids from mammals are well known in the art. Where the biological sample is to include mRNA, a tissue biopsy is the preferred source.

[0301] The methos) provided above may preferrably be applied in a diagnostic method and/or kits in which polynucleotides and/or polypeptides of the invention are attached to a solid support. In one exemplary method, the support may be a “gene chip” or a “biological chip” as described in US Patents 5,837,832, 5,874,219, and 5,856,174. Further, such a gene chip with lung cancer polynucleotides attached may be used to identify polymorphisms between the lung cancer polynucleotide sequences, with polynucleotides isolated from a test subject. The knowledge of such polymorphisms (i.e. their location, as well as, their existence) would be beneficial in identifying disease loci for many disorders, such as for example, in neural disorders, immune system disorders, muscular disorders, reproductive disorders, gastrointestinal disorders, pulmonary disorders, cardiovascular disorders, renal disorders, proliferative disorders, and/or cancerous diseases and conditions, though most preferably in lung related proliferative, and/or cancerous diseases and conditions. Such a method is described in US Patents 5,858,659 and 5,856,104. The US Patents referenced supra are hereby incorporated by reference in their entirety herein.

[0302] The present invention encompasses lung cancer polynucleotides that are chemically synthesized, or reproduced as peptide nucleic acids (PNA), or according to other methods known in the art. The use of PNAs would serve as the preferred form if the polynucleotides of the invention are incorporated onto a solid support, or gene chip. For the purposes of the present invention, a peptide nucleic acid (PNA) is a polyamide type of DNA analog and the monomeric units for adenine, guanine, thymine and cytosine are available commercially (Perceptive Biosystems). Certain components of DNA, such as phosphorus, phosphorus oxides, or deoxyribose derivatives, are not present in PNAs. As disclosed by P. E. Nielsen, M. Egholm, R. H. Berg and 0. Buchardt, Science 254, 1497 (1991); and M. Egholm, 0. Buchardt, L.Christensen, C. Behrens, S. M. Freier, D. A. Driver, R. H. Berg, S. K. Kim, B. Norden, and P. E. Nielsen, Nature 365, 666 (1993), PNAs bind specifically and tightly to complementary DNA strands and are not degraded by nucleases. In fact, PNA binds more strongly to DNA than DNA itself does. This is probably because there is no electrostatic repulsion between the two strands, and also the polyamide backbone is more flexible. Because of this, PNA/DNA duplexes bind under a wider range of stringency conditions than DNA/DNA duplexes, making it easier to perform multiplex hybridization. Smaller probes can be used than with DNA due to the strong binding. In addition, it is more likely that single base mismatches can be determined with PNA/DNA hybridization because a single mismatch in a PNA/DNA 15-mer lowers the melting point (T.sub.m) by 8°-20° C., vs. 4°-16° C. for the DNA/DNA 15-mer duplex. Also, the absence of charge groups in PNA means that hybridization can be done at low ionic strengths and reduce possible interference by salt during the analysis.

[0303] The present invention have uses which include, but are not limited to, detecting cancer in mammals. In particular the invention is useful during diagnosis of pathological cell proliferative neoplasias which include, but are not limited to: acute myelogenous leukemias including acute monocytic leukemia, acute myeloblastic leukemia, acute promyelocytic leukemia, acute myelomonocytic leukemia, acute erythroleukemia, acute megakaryocytic leukemia, and acute undifferentiated leukemia, etc.; and chronic myelogenous leukemias including chronic myelomonocytic leukemia, chronic granulocytic leukemia, etc. Preferred mammals include monkeys, apes, cats, dogs, cows, pigs, horses, rabbits and humans. Particularly preferred are humans.

[0304] Pathological cell proliferative disorders are often associated with inappropriate activation of proto-oncogenes. (Gelmann, E. P. et al., “The Etiology of Acute Leukemia: Molecular Genetics and Viral Oncology,” in Neoplastic Diseases of the Blood, Vol 1., Wiemik, P. H. et al. eds., 161-182 (1985)). Neoplasias are now believed to result from the qualitative alteration of a normal cellular gene product, or from the quantitative modification of gene expression by insertion into the chromosome of a viral sequence, by chromosomal translocation of a gene to a more actively transcribed region, or by some other mechanism. (Gelmann et al., supra) It is likely that mutated or altered expression of specific genes is involved in the pathogenesis of some leukemias, among other tissues and cell types. (Gelmann et al., supra) Indeed, the human counterparts of the oncogenes involved in some animal neoplasias have been amplified or translocated in some cases of human leukemia and carcinoma. (Gelmann et al., supra)

[0305] For example, c-myc expression is highly amplified in the non-lymphocytic leukemia cell line HL-60. When HL-60 cells are chemically induced to stop proliferation, the level of c-myc is found to be downregulated. (International Publication Number WO 91/15580). However, it has been shown that exposure of HL-60 cells to a DNA construct that is complementary to the 5′end of c-myc or c-myb blocks translation of the corresponding mRNAs which downregulates expression of the c-myc or c-myb proteins and causes arrest of cell proliferation and differentiation of the treated cells. (International Publication Number WO 91/15580; Wickstrom et al., Proc. Natl. Acad. Sci. 85:1028 (1988); Anfossi et al., Proc. Natl. Acad. Sci. 86:3379 (1989)). However, the skilled artisan would appreciate the present invention's usefulness is not limited to treatment of proliferative disorders of hematopoietic cells and tissues, in light of the numerous cells and cell types of varying origins which are known to exhibit proliferative phenotypes.

[0306] In addition to the foregoing, a lung cancer antigen polynucleotide can be used to control gene expression through triple helix formation or through antisense DNA or RNA. Antisense techniques are discussed, for example, in Okano, J. Neurochem. 56: 560 (1991); “Oligodeoxynucleotides as Antisense Inhibitors of Gene Expression, CRC Press, Boca Raton, Fla. (1988). Triple helix formation is discussed in, for instance Lee et al., Nucleic Acids Research 6: 3073 (1979); Cooney et al., Science 241: 456 (1988); and Dervan et al., Science 251: 1360 (1991). Both methods rely on binding of the polynucleotide to a complementary DNA or RNA. For these techniques, preferred polynucleotides are usually oligonucleotides 20 to 40 bases in length and complementary to either the region of the gene involved in transcription (triple helix - see Lee et al., Nucl. Acids Res. 6:3073 (1979); Cooney et al., Science 241:456 (1988); and Dervan et al., Science 251:1360 (1991) ) or to the MRNA itself (antisense - Okano, J. Neurochem. 56:560 (1991); Oligodeoxy-nucleotides as Antisense Inhibitors of Gene Expression, CRC Press, Boca Raton, FL (1988).) Triple helix formation optimally results in a shut-off of RNA transcription from DNA, while antisense RNA hybridization blocks translation of an mRNA molecule into polypeptide. The oligonucleotide described above can also be delivered to cells such that the antisense RNA or DNA may be expressed in vivo to inhibit production of polypeptide of the present invention antigens. Both techniques are effective in model systems, and the information disclosed herein can be used to design antisense or triple helix polynucleotides in an effort to treat disease, and in particular, for the treatment of proliferative diseases and/or conditions.

[0307] Polynucleotides of the present invention are also useful in gene therapy. One goal of gene therapy is to insert a normal gene into an organism having a defective gene, in an effort to correct the genetic defect. The polynucleotides disclosed in the present invention offer a means of targeting such genetic defects in a highly accurate manner. Another goal is to insert a new gene that was not present in the host genome, thereby producing a new trait in the host cell.

[0308] The polynucleotides are also useful for identifying individuals from minute biological samples. The United States military, for example, is considering the use of restriction fragment length polymorphism (RFLP) for identification of its personnel. In this technique, an individual's genomic DNA is digested with one or more restriction enzymes, and probed on a Southern blot to yield unique bands for identifying personnel. This method does not suffer from the current limitations of “Dog Tags” which can be lost, switched, or stolen, making positive identification difficult. The polynucleotides of the present invention can be used as additional DNA markers for RFLP.

[0309] The polynucleotides of the present invention can also be used as an alternative to RFLP, by determining the actual base-by-base DNA sequence of selected portions of an individual's genome. These sequences can be used to prepare PCR primers for amplifying and isolating such selected DNA, which can then be sequenced. Using this technique, individuals can be identified because each individual will have a unique set of DNA sequences. Once an unique ID database is established for an individual, positive identification of that individual, living or dead, can be made from extremely small tissue samples.

[0310] Forensic biology also benefits from using DNA-based identification techniques as disclosed herein. DNA sequences taken from very small biological samples such as tissues, e.g., hair or skin, or body fluids, e.g., blood, saliva, semen, synovial fluid, amniotic fluid, breast milk, lymph, pulmonary sputum or surfactant, urine, fecal matter, etc., can be amplified using PCR. In one prior art technique, gene sequences amplified from polymorphic loci, such as DQa class II HLA gene, are used in forensic biology to identify individuals. (Erlich, H., PCR Technology, Freeman and Co. (1992).) Once these specific polymorphic loci are amplified, they are digested with one or more restriction enzymes, yielding an identifying set of bands on a Southern blot probed with DNA corresponding to the DQa class II HLA gene. Similarly, polynucleotides of the present invention can be used as polymorphic markers for forensic purposes.

[0311] There is also a need for reagents capable of identifying the source of a particular tissue. Such need arises, for example, in forensics when presented with tissue of unknown origin. Appropriate reagents can comprise, for example, DNA probes or primers specific to lung or lung cancer polynucleotides prepared from the sequences of the present invention. Panels of such reagents can identify tissue by species and/or by organ type. In a similar fashion, these reagents can be used to screen tissue cultures for contamination.

[0312] The polynucleotides of the present invention are also useful as hybridization probes for differential identification of the tissus) or cell typs) present in a biological sample. Similarly, polypeptides and antibodies directed to polypeptides of the present invention are useful to provide immunological probes for differential identification of the tissus) (e.g., immunohistochemistry assays) or cell typs) (e.g., immunocytochemistry assays). In addition, for a number of disorders of the above tissues or cells, significantly higher or lower levels of gene expression of the polynucleotides/polypeptides of the present invention may be detected in certain tissues (e.g., tissues expressing polypeptides and/or polynucleotides of the present invention, lung and lung cancer tissues and/or cancerous and/or wounded tissues) or bodily fluids (e.g., sputum, serum, plasma, urine, synovial fluid or spinal fluid) taken from an individual having such a disorder, relative to a “standard” gene expression level, i.e., the expression level in healthy tissue from an individual not having the disorder.

[0313] Thus, the invention provides a diagnostic method of a disorder, which involves: (a) assaying gene expression level in cells or body fluid of an individual; (b) comparing the gene expression level with a standard gene expression level, whereby an increase or decrease in the assayed gene expression level compared to the standard expression level is indicative of a disorder.

[0314] In the very least, the polynucleotides of the present invention can be used as molecular weight markers on Southern gels, as diagnostic probes for the presence of a specific MRNA in a particular cell type, as a probe to “subtract-out” known sequences in the process of discovering novel polynucleotides, for selecting and making oligomers for attachment to a “gene chip” or other support, to raise anti-DNA antibodies using DNA immunization techniques, and as an antigen to elicit an immune response.

[0315] Uses of the Polypeptides

[0316] Each of the polypeptides identified herein can be used in numerous ways. The following description should be considered exemplary and utilizes known techniques.

[0317] Polypeptides and antibodies directed to polypeptides of the present invention are useful to provide immunological probes for differential identification of the tissus) (e.g., immunohistochemistry assays such as, for example, ABC immunoperoxidase (Hsu et al., J. Histochem. Cytochem. 29:577-580 (1981)) or cell typs) (e.g., immunocytochemistry assays).

[0318] Antibodies can be used to assay levels of polypeptides encoded by polynucleotides of the invention in a biological sample using classical immunohistological methods known to those of skill in the art (e.g., see Jalkanen, et al., J. Cell. Biol. 101:976-985 (1985); Jalkanen, et al., J. Cell. Biol. 105:3087-3096 (1987)). Other antibody-based methods useful for detecting protein gene expression include immunoassays, such as the enzyme linked immunosorbent assay (ELISA) and the radioimmunoassay (RIA). Suitable antibody assay labels are known in the art and include enzyme labels, such as, glucose oxidase; radioisotopes, such as iodine (¹³¹I, ¹²⁵I, ¹²³I, ¹²¹I), carbon (¹⁴C), sulfur (³⁵), tritium (³H), indium (^{115m}In, 113mIn, ¹¹²In, ¹¹¹In), and technetium (⁹⁹Tc, ^{99m}Tc), thallium (²⁰¹Ti), gallium (⁶⁸Ga, ⁶⁷Ga), palladium (¹⁰³ Pd), molybdenum (⁹⁹Mo), xenon (¹³³Xe), fluorine (¹⁸F), ¹⁵³Sm, ¹⁷⁷Lu, ¹⁵⁹Gd, ¹⁴⁹Pm, ¹⁴⁰La, ¹⁷⁵Yb, ¹⁶⁶Ho, ⁹⁰Y, ⁴⁷Sc, ¹⁸⁶Re, ¹⁸⁸Re, ¹⁴²Pr, ¹⁰⁵Rh, ⁹⁷Ru; luminescent labels, such as luminol; and fluorescent labels, such as fluorescein and rhodamine, and biotin.

[0319] In addition to assaying levels of polypeptide of the present invention in a biological sample, proteins can also be detected in vivo by imaging. Antibody labels or markers for in vivo imaging of protein include those detectable by X-radiography, NMR or ESR. For X-radiography, suitable labels include radioisotopes such as barium or cesium, which emit detectable radiation but are not overtly harmful to the subject. Suitable markers for NMR and ESR include those with a detectable characteristic spin, such as deuterium, which may be incorporated into the antibody by labeling of nutrients for the relevant hybridoma.

[0320] A protein-specific antibody or antibody fragment which has been labeled with an appropriate detectable imaging moiety, such as a radioisotope (for example, ¹³¹I, ¹¹²In, ^{99m}Tc, (¹³¹I, ¹²⁵I, ¹²³I, ¹²¹I), carbon (¹⁴C), sulfur (³⁵S), tritium (³H), indium (^{115m}In, ^{113m}In, ¹¹²In, ¹¹¹In), and technetium (⁹⁹Tc, ^{99m}Tc), thallium (²⁰¹Ti), gallium (⁶⁸Ga, ⁶⁷Ga), palladium (¹⁰³Pd), molybdenum (⁹⁹Mo), xenon (¹³³Xe), fluorine (¹⁸F, ¹⁵³Sm, ¹⁷⁷Lu, ¹⁵⁹Gd, ¹⁴⁹Pm, ¹⁴⁰La, ¹⁷⁵Yb, ¹⁶⁶Ho, ⁹⁰Y Sc, ¹⁸⁶Re, ¹⁸⁸Re, ¹⁴²Pr, ¹⁰⁵Rh, ⁹⁷Ru), a radio-opaque substance, or a material detectable by nuclear magnetic resonance, is introduced (for example, parenterally, subcutaneously or intraperitoneally) into the mammal to be examined for immune system disorder. It will be understood in the art that the size of the subject and the imaging system used will determine the quantity of imaging moiety needed to produce diagnostic images. In the case of a radioisotope moiety, for a human subject, the quantity of radioactivity injected will normally range from about 5 to 20 millicuries of ^{99m}Tc. The labeled antibody or antibody fragment will then preferentially accumulate at the location of cells which express the polypeptide encoded by a polynucleotide of the invention. In vivo tumor imaging is described in S.W. Burchiel et al., “Immunopharmacokinetics of Radiolabeled Antibodies and Their Fragments” (Chapter 13 in Tumor Imaging: The Radiochemical Detection of Cancer, S.W. Burchiel and B. A. Rhodes, eds., Masson Publishing Inc. (1982)).

[0321] In one embodiment, the invention provides a method for the specific delivery of compositions of the invention to cells by administering polypeptides of the invention (e.g., polypeptides encoded by polynucleotides of the invention and/or antibodies) that are associated with heterologous polypeptides or nucleic acids. In one example, the invention provides a method for delivering a therapeutic protein into the targeted cell. In another example, the invention provides a method for delivering a single stranded nucleic acid (e.g., antisense or ribozymes) or double stranded nucleic acid (e.g., DNA that can integrate into the cell's genome or replicate episomally and that can be transcribed) into the targeted cell.

[0322] In another embodiment, the invention provides a method for the specific destruction of cells (e.g., the destruction of tumor cells) by administering polypeptides of the invention in association with toxins or cytotoxic prodrugs.

[0323] In a preferred embodiment, the invention provides a method for the specific destruction of lung cells (e.g., aberrant lung cells, lung neoplasm) by administering polypeptides of the invention (e.g., polypeptides encoded by polynucleotides of the invention and/or antibodies) in association with toxins or cytotoxic prodrugs.

[0324] By “toxin” is meant one or more compounds that bind and activate endogenous cytotoxic effector systems, radioisotopes, holotoxins, modified toxins, catalytic subunits of toxins, or any molecules or enzymes not normally present in or on the surface of a cell that under defined conditions cause the cell's death. Toxins that may be used according to the methods of the invention include, but are not limited to, radioisotopes known in the art, compounds such as, for example, antibodies (or complement fixing containing portions thereof) that bind an inherent or induced endogenous cytotoxic effector system, thymidine kinase, endonuclease, RNAse, alpha toxin, ricin, abrin, Pseudomonas exotoxin A, diphtheria toxin, saporin, momordin, gelonin, pokeweed antiviral protein, alpha-sarcin and cholera toxin. “Toxin” also includes a cytostatic or cytocidal agent, a therapeutic agent or a radioactive metal ion, e.g., alpha-emitters such as, for example, ²¹³Bi, or other radioisotopes such as, for example, ¹⁰³Pd, 133 131I, ^{68 Co,} ⁶⁵Zn, ⁸⁵Sr, ³²P, ³⁵S, ⁹⁰Y, ¹⁵³Sm, ¹⁵³Gd, ¹⁶⁹Yb, ⁵¹Cr, ⁵⁴Mn, ⁷⁵Se, ¹¹³Sn, ⁹⁰Yttrium, ¹¹⁷Tin, ¹⁸⁶Rhenium, ¹⁶⁶Holmium, and ¹⁸⁸Rhenium; luminescent labels, such as luminol; and fluorescent labels, such as fluorescein and rhodamine, and biotin.

[0325] Techniques known in the art may be applied to label polypeptides of the invention (including antibodies). Such techniques include, but are not limited to, the use of bifunctional conjugating agents (see e.g., U.S. Pat. Nos. 5,756,065; 5,714,631; 5,696,239; 5,652,361; 5,505,931; 5,489,425; 5,435,990; 5,428,139; 5,342,604; 5,274,119; 4,994,560; and 5,808,003; the contents of each of which are hereby incorporated by reference in its entirety).

[0326] Thus, the invention provides a diagnostic method of a disorder, which involves (a) assaying the expression level of a lung cancer polypeptide of the present invention in cells or body fluid of an individual, or more preferrably, assaying the expression level of a lung cancer polypeptide of the present invention in lung cells or sputum of an individual; and (b) comparing the assayed polypeptide expression level with a standard polypeptide expression level, whereby an increase or decrease in the assayed polypeptide expression level compared to the standard expression level is indicative of a disorder. With respect to cancer, the presence of a relatively high amount of transcript in biopsied tissue from an individual may indicate a predisposition for the development of the disease, or may provide a means for detecting the disease prior to the appearance of actual clinical symptoms. A more definitive diagnosis of this type may allow health professionals to employ preventative measures or aggressive treatment earlier thereby preventing the development or further progression of the cancer.

[0327] Moreover, lung cancer antigen polypeptides of the present invention can be used to treat or prevent diseases or conditions such as, for example, neural disorders, immune system disorders, muscular disorders, reproductive disorders, gastrointestinal disorders, pulmonary disorders, cardiovascular disorders, renal disorders, proliferative disorders, and/or cancerous diseases and conditions, preferably proliferative disorders of the lung, and/or cancerous disease and conditions. For example, patients can be administered a polypeptide of the present invention in an effort to replace absent or decreased levels of the polypeptide (e.g., insulin), to supplement absent or decreased levels of a different polypeptide (e.g., hemoglobin S for hemoglobin B, SOD, catalase, DNA repair proteins), to inhibit the activity of a polypeptide (e.g., an oncogene or tumor supressor), to activate the activity of a polypeptide (e.g., by binding to a receptor), to reduce the activity of a membrane bound receptor by competing with it for free ligand (e.g., soluble TNF receptors used in reducing inflammation), or to bring about a desired response (e.g., blood vessel growth inhibition, enhancement of the immune response to proliferative cells or tissues).

[0328] Similarly, antibodies directed to a polypeptide of the present invention can also be used to treat disease (as described supra, and elsewhere herein). For example, administration of an antibody directed to a polypeptide of the present invention can bind, and/or neutralize the polypeptide, and/or reduce overproduction of the polypeptide. Similarly, administration of an antibody can activate the polypeptide, such as by binding to a polypeptide bound to a membrane (receptor).

[0329] At the very least, the polypeptides of the present invention can be used as molecular weight markers on SDS-PAGE gels or on molecular sieve gel filtration columns using methods well known to those of skill in the art. Polypeptides can also be used to raise antibodies, which in turn are used to measure protein expression from a recombinant cell, as a way of assessing transformation of the host cell. Moreover, the polypeptides of the present invention can be used to test the following biological activities. Diagnostic Asssays

[0330] The compounds of the present invention are useful for diagnosis, treatment, prevention and/or prognosis of various lung related disorders in mammals, preferably humans. Such disorders include, but are not limited to, small cell lung cancer, non-small cell lung cancer (e.g., squamous cell carcinoma (also called epidermoid carcinoma), adenocarcinoma, large cell carcinoma, adenosquamous carcinoma, and undifferentiated carcinoma), lung cancer metastases, and/or as described under “Hyperproliferative Disorders” and “Respiratory Disorders” below.

[0331] Lung cancer antigens are expressed in the respiratory system, with an increased expression level in the lung. For a number of lung-related disorders, substantially altered (increased or decreased) levels of lung cancer antigen gene expression can be detected in lung tissue or other cells or bodily fluids (e.g., sera, plasma, urine, semen, synovial fluid or spinal fluid) taken from an individual having such a disorder, relative to a “standard” lung cancer antigen gene expression level, that is, the lung cancer antigen expression level in lung tissues or bodily fluids from an individual not having the lung disorder. Thus, the invention provides a diagnostic method useful during diagnosis of lung cancer, which involves measuring the expression level of the gene encoding the lung cancer associated polypeptide in lung tissue or other cells or body fluid from an individual and comparing the measured gene expression level with a standard lung cancer antigens gene expression level, whereby an increase or decrease in the gene expression leves) compared to the standard is indicative of lung cancer.

[0332] In specific embodiments, the invention provides a diagnostic method useful during diagnosis of a disorder of a normal or diseased tissue/cell source, which involves measuring the expression level of the coding sequence of a polynucleotide sequence associated with this tissue/cell source as disclosed in Tables 1 and 5 in the tissue/cell source or other cells or body fluid from an individual and comparing the expression level of the coding sequence with a standard expression level of the coding sequence of a polynucleotide sequence, whereby an increase or decrease in the gene expression leves) compared to the standard is indicative of a disorder of a normal or diseased tissue/cell source.

[0333] In particular, it is believed that certain tissues in mammals with cancer of cells or tissue of the lung express significantly enhanced or reduced levels of normal or altered lung cancer antigen expression and MRNA encoding the lung cancer associated polypeptide when compared to a corresponding “standard” level. Further, it is believed that enhanced or depressed levels of the lung cancer associated polypeptide can be detected in certain body fluids (e.g., sera, plasma, urine, and spinal fluid) or cells or tissue from mammals with such a cancer when compared to sera from mammals of the same species not having the cancer.

[0334] For example, as disclosed herein, lung cancer associated polypeptides of the invention are expressed in the lung. Accordingly, polynucleotides of the invention (e.g., polynucleotide sequences complementary to all or a portion of a lung cancer antigen MRNA nucleotide sequence of SEQ ID NO:X, the nucleotide coding sequence of the related cDNA contained in a deposited library, a nucleotide sequence encoding SEQ ID NO:Y, a nucleotide sequence encoding a polypeptide encoded by SEQ ID NO:X, the nucleotide sequence encoding the polypeptide encoded by the cDNA in the related cDNA contained in a deposited library, polynucleotide fragments of any of these nucleic acid molecules (e.g., those fragments described herein), and/or antibodies (and antibody fragments) directed against the polypeptides of the invention may be used to quantitate or qualitate concentrations of cells of the lung expressing lung cancer antigens, preferrably on their cell surfaces. These polynucleotides and antibodies additionally have diagnostic applications in detecting abnormalities in the level of lung cancer antigens gene expression, or abnormalities in the structure and/or temporal, tissue, cellular, or subcellular location of lung cancer antigens. These diagnostic assays may be performed in vivo or in vitro, such as, for example, on blood samples, biopsy tissue or autopsy tissue.

[0335] Thus, the invention provides a diagnostic method useful during diagnosis of a lung disorder, including cancers, which involves measuring the expression level of the gene encoding the lung cancer antigen polypeptide in lung tissue or other cells or body fluid from an individual and comparing the measured gene expression level with a standard lung cancer antigen gene expression level, whereby an increase or decrease in the gene expression level compared to the standard is indicative of a lung disorder.

[0336] Where a diagnosis of a disorder in the lung, including diagnosis of a tumor, has already been made according to conventional methods, the present invention is useful as a prognostic indicator, whereby patients exhibiting enhanced or depressed lung cancer antigen gene expression will experience a worse clinical outcome relative to patients expressing the gene at a level nearer the standard level.

[0337] By “assaying the expression level of the gene encoding the lung cancer associated polypeptide” is intended qualitatively or quantitatively measuring or estimating the level of the lung cancer antigen polypeptide or the level of the mRNA encoding the lung cancer antigen polypeptide in a first biological sample either directly (e.g., by determining or estimating absolute protein level or MRNA level) or relatively (e.g., by comparing to the lung cancer associated polypeptide level or mRNA level in a second biological sample). Preferably, the lung cancer antigen polypeptide expression level or MRNA level in the first biological sample is measured or estimated and compared to a standard lung cancer antigen polypeptide level or MRNA level, the standard being taken from a second biological sample obtained from an individual not having the disorder or being determined by averaging levels from a population of individuals not having a disorder of the lung. As will be appreciated in the art, once a standard lung cancer antigen polypeptide level or MRNA level is known, it can be used repeatedly as a standard for comparison.

[0338] By “biological sample” is intended any biological sample obtained from an individual, cell line, tissue culture, or other source containing lung cancer antigen polypeptides (including portions thereof) or MRNA. As indicated, biological samples include body fluids (such as sera, plasma, urine, synovial fluid and spinal fluid) which contain cells expressing lung cancer antigen polypeptides, lung tissue, and other tissue sources found to express the full length or fragments thereof of a lung cancer antigen. Methods for obtaining tissue biopsies and body fluids from mammals are well known in the art. Where the biological sample is to include MRNA, a tissue biopsy is the preferred source.

[0339] Total cellular RNA can be isolated from a biological sample using any suitable technique such as the single-step guanidinium-thiocyanate-phenol-chloroform method described in Chomczynski and Sacchi, Anal. Biochem. 162:156-159 (1987). Levels of MRNA encoding the lung cancer antigen polypeptides are then assayed using any appropriate method. These include Northern blot analysis, S1 nuclease mapping, the polymerase chain reaction (PCR), reverse transcription in combination with the polymerase chain reaction (RT-PCR), and reverse transcription in combination with the ligase chain reaction (RT-LCR).

[0340] The present invention also relates to diagnostic assays such as quantitative and diagnostic assays for detecting levels of lung cancer antigen polypeptides, in a biological sample (e.g., cells and tissues), including determination of normal and abnormal levels of polypeptides. Thus, for instance, a diagnostic assay in accordance with the invention for detecting over-expression of lung cancer antigens compared to normal control tissue samples may be used to detect the presence of tumors. Assay techniques that can be used to determine levels of a polypeptide, such as a lung cancer antigen polypeptide of the present invention in a sample derived from a host are well-known to those of skill in the art. Such assay methods include radioimmunoassays, competitive-binding assays, Western Blot analysis and ELISA assays. Assaying lung cancer antigen polypeptide levels in a biological sample can occur using any art-known method.

[0341] Assaying lung cancer antigen polypeptide levels in a biological sample can occur using antibody-based techniques. For example, lung cancer antigen polypeptide expression in tissues can be studied with classical immunohistological methods (Jalkanen et al., J. Cell. Biol. 101:976-985 (1985); Jalkanen, M., et al., J. Cell . Biol. 105:3087-3096 (1987)). Other antibody-based methods useful for detecting lung cancer antigen polypeptide gene expression include immunoassays, such as the enzyme linked immunosorbent assay (ELISA) and the radioimmunoassay (RIA). Suitable antibody assay labels are known in the art and include enzyme labels, such as, glucose oxidase, and radioisotopes, such as iodine (¹²⁵I, ¹²¹I), carbon (¹⁴C), sulfur (³⁵S), tritium (³H), indium (¹¹²In), and technetium (^{99m}Tc), and fluorescent labels, such as fluorescein and rhodamine, and biotin.

[0342] The tissue or cell type to be analyzed will generally include those which are known, or suspected, to express the lung cancer antigen gene (such as, for example, cells of the lung or lung cancer). The protein isolation methods employed herein may, for example, be such as those described in Harlow and Lane (Harlow, E. and Lane, D., 1988, “Antibodies: A Laboratory Manual”, Cold Spring Harbor Laboratory Press, Cold Spring Harbor, New York), which is incorporated herein by reference in its entirety. The isolated cells can be derived from cell culture or from a patient. The analysis of cells taken from culture may be a necessary step in the assessment of cells that could be used as part of a cell-based gene therapy technique or, alternatively, to test the effect of compounds on the expression of the lung cancer antigen gene.

[0343] For example, antibodies, or fragments of antibodies, such as those described herein, may be used to quantitatively or qualitatively detect the presence of lung cancer antigen gene products or conserved variants or peptide fragments thereof. This can be accomplished, for example, by immunofluorescence techniques employing a fluorescently labeled antibody coupled with light microscopic, flow cytometric, or fluorimetric detection.

[0344] In a preferred embodiment, antibodies, or fragments of antibodies directed to any one or all of the predicted epitope domains of the lung cancer antigen polypeptides (Shown in Table 4) may be used to quantitatively or qualitatively detect the presence of lung cancer antigen gene products or conserved variants or peptide fragments thereof. This can be accomplished, for example, by immunofluorescence techniques employing a fluorescently labeled antibody coupled with light microscopic, flow cytometric, or fluorimetric detection.

[0345] In an additional preferred embodiment, antibodies, or fragments of antibodies directed to a conformational epitope of a lung cancer antigen may be used to quantitatively or qualitatively detect the presence of lung cancer antigen gene products or conserved variants or peptide fragments thereof. This can be accomplished, for example, by immunofluorescence techniques employing a fluorescently labeled antibody coupled with light microscopic, flow cytometric, or fluorimetric detection.

[0346] The antibodies (or fragments thereof), and/or lung cancer antigen polypeptides of the present invention may, additionally, be employed histologically, as in immunofluorescence, immunoelectron microscopy or non-immunological assays, for in situ detection of lung cancer antigen gene products or conserved variants or peptide fragments thereof. In situ detection may be accomplished by removing a histological specimen from a patient, and applying thereto a labeled antibody or lung cancer antigen polypeptide of the present invention. The antibody (or fragment thereof) or lung cancer antigen polypeptide is preferably applied by overlaying the labeled antibody (or fragment) onto a biological sample. Through the use of such a procedure, it is possible to determine not only the presence of the lung cancer antigen gene product, or conserved variants or peptide fragments, or lung cancer antigen polypeptide binding, but also its distribution in the examined tissue. Using the present invention, those of ordinary skill will readily perceive that any of a wide variety of histological methods (such as staining procedures) can be modified in order to achieve such in situ detection.

[0347] Immunoassays and non-immunoassays for lung cancer antigen gene products or conserved variants or peptide fragments thereof will typically comprise incubating a sample, such as a biological fluid, a tissue extract, freshly harvested cells, or lysates of cells which have been incubated in cell culture, in the presence of a detectably labeled antibody capable of binding lung cancer antigen gene products or conserved variants or peptide fragments thereof, and detecting the bound antibody by any of a number of techniques well-known in the art.

[0348] The biological sample may be brought in contact with and immobilized onto a solid phase support or carrier such as nitrocellulose, or other solid support which is capable of immobilizing cells, cell particles or soluble proteins. The support may then be washed with suitable buffers followed by treatment with the detectably labeled anti-lung cancer antigen antibody or detectable lung cancer antigen polypeptide. The solid phase support may then be washed with the buffer a second time to remove unbound antibody or polypeptide. Optionally the antibody is subsequently labeled. The amount of bound label on solid support may then be detected by conventional means.

[0349] By “solid phase support or carrier” is intended any support capable of binding an antigen or an antibody. Well-known supports or carriers include glass, polystyrene, polypropylene, polyethylene, dextran, nylon, amylases, natural and modified celluloses, polyacrylamides, gabbros, and magnetite. The nature of the carrier can be either soluble to some extent or insoluble for the purposes of the present invention. The support material may have virtually any possible structural configuration so long as the coupled molecule is capable of binding to an antigen or antibody. Thus, the support configuration may be spherical, as in a bead, or cylindrical, as in the inside surface of a test tube, or the external surface of a rod. Alternatively, the surface may be flat such as a sheet, test strip, etc. Preferred supports include polystyrene beads. Those skilled in the art will know many other suitable carriers for binding antibody or antigen, or will be able to ascertain the same by use of routine experimentation.

[0350] The binding activity of a given lot of anti-lung cancer antigen antibody or lung cancer antigen polypeptide may be determined according to well known methods. Those skilled in the art will be able to determine operative and optimal assay conditions for each determination by employing routine experimentation.

[0351] In addition to assaying lung cancer antigen polypeptide levels or polynucleotide levels. in a biological sample obtained from an individual, lung cancer antigen polypeptide or polynucleotide can also be detected in vivo by imaging. For example, in one embodiment of the invention, lung cancer antigen polypeptide and/or anti-lung cancer antigen antibodies are used to image lung diseased cells, such as neoplasms. In another embodiment, lung cancer antigen polynucleotides of the invention (e.g., polynucleotides complementary to all or a portion of lung cancer antigen MRNA) and/or anti-lung cancer antigen antibodies (e.g., antibodies directed to any one or a combination of the epitopes of lung cancer antigens, antibodies directed to a conformational epitope of lung cancer antigens, antibodies directed to the full length polypeptide expressed on the cell surface of a mammalian cell) are used to image diseased or neoplastic cells of the lung.

[0352] Antibody labels or markers for in vivo imaging of lung cancer antigen polypeptides include those detectable by X-radiography, NMR, MRI, CAT-scans or ESR. For X-radiography, suitable labels include radioisotopes such as barium or cesium, which emit detectable radiation but are not overtly harmful to the subject. Suitable markers for NMR and ESR include those with a detectable characteristic spin, such as deuterium, which may be incorporated into the antibody by labeling of nutrients for the relevant hybridoma. Where in vivo imaging is used to detect enhanced levels of lung cancer antigen polypeptides for diagnosis in humans, it may be preferable to use human antibodies or “humanized” chimeric monoclonal antibodies. Such antibodies can be produced using techniques described herein or otherwise known in the art. For example methods for producing chimeric antibodies are known in the art. See, for review, Morrison, Science 229:1202 (1985); Oi et al., BioTechniques 4:214 (1986); Cabilly et al., U.S. Pat. No. 4,816,567; Taniguchi et al., EP 171496; Morrison et al., EP 173494; Neuberger et al., WO 8601533; Robinson et al., WO 8702671; Boulianne et al., Nature 312:643 (1984); Neuberger et al., Nature 314:268 (1985).

[0353] Additionally, any lung cancer antigen polypeptides whose presence can be detected, can be administered. For example, lung cancer antigen polypeptides labeled with a radio-opaque or other appropriate compound can be administered and visualized in vivo, as discussed, above for labeled antibodies. Further such lung cancer antigen polypeptides can be utilized for in vitro diagnostic procedures.

[0354] A lung cancer antigen polypeptide-specific antibody or antibody fragment which has been labeled with an appropriate detectable imaging moiety, such as a radioisotope (for example, ¹³¹I, ¹¹²In, ^{99m}Tc), a radio-opaque substance, or a material detectable by nuclear magnetic resonance, is introduced (for example, parenterally, subcutaneously or intraperitoneally) into the mammal to be examined for a lung disorder. It will be understood in the art that the size of the subject and the imaging system used will determine the quantity of imaging moiety needed to produce diagnostic images. In the case of a radioisotope moiety, for a human subject, the quantity of radioactivity injected will normally range from about 5 to 20 millicuries of ^{99m}Tc. The labeled antibody or antibody fragment will then preferentially accumulate at the location of cells which contain lung cancer antigen protein. In vivo tumor imaging is described in S.W. Burchiel et al., “Immunopharmacokinetics of Radiolabeled Antibodies and Their Fragments” (Chapter 13 in Tumor Imaging: The Radiochemical Detection of Cancer, S.W. Burchiel and B. A. Rhodes, eds., Masson Publishing Inc. (1982)).

[0355] With respect to antibodies, one of the ways in which the anti-lung cancer antigen antibody can be detectably labeled is by linking the same to an enzyme and using the linked product in an enzyme immunoassay (EIA) (Voller, A., “The Enzyme Linked Immunosorbent Assay (ELISA)”, 1978, Diagnostic Horizons 2:1-7, Microbiological Associates Quarterly Publication, Walkersville, Md.); Voller et al., J. Clin. Pathol. 31:507-520 (1978); Butler, J.E., Meth. Enzymol. 73:482-523 (1981); Maggio, E. (ed.), 1980, Enzyme Immunoassay, CRC Press, Boca Raton, FL,; Ishikawa, E. et al., (eds.), 1981, Enzyme Immunoassay, Kgaku Shoin, Tokyo). The enzyme, which is bound to the antibody will react with an appropriate substrate, preferably a chromogenic substrate, in such a manner as to produce a chemical moiety which can be detected, for example, by spectrophotometric, fluorimetric or by visual means. Enzymes which can be used to detectably label the antibody include, but are not limited to, malate dehydrogenase, staphylococcal nuclease, delta-5-steroid isomerase, yeast alcohol dehydrogenase, alpha-glycerophosphate, dehydrogenase, triose phosphate isomerase, horseradish peroxidase, alkaline phosphatase, asparaginase, glucose oxidase, beta-galactosidase, ribonuclease, urease, catalase, glucose-6-phosphate dehydrogenase, glucoamylase and acetylcholinesterase. Additionally, the detection can be accomplished by colorimetric methods which employ a chromogenic substrate for the enzyme. Detection may also be accomplished by visual comparison of the extent of enzymatic reaction of a substrate in comparison with similarly prepared standards.

[0356] Detection may also be accomplished using any of a variety of other immunoassays. For example, by radioactively labeling the antibodies or antibody fragments, it is possible to detect lung cancer antigens through the use of a radioimmunoassay (RIA) (see, for example, Weintraub, B., Principles of Radioimmunoassays, Seventh Training Course on Radioligand Assay Techniques, The Endocrine Society, March, 1986, which is incorporated by reference herein). The radioactive isotope can be detected by means including, but not limited to, a gamma counter, a scintillation counter, or autoradiography.

[0357] It is also possible to label the antibody with a fluorescent compound. When the fluorescently labeled antibody is exposed to light of the proper wave length, its presence can then be detected due to fluorescence. Among the most commonly used fluorescent labeling compounds are fluorescein isothiocyanate, rhodamine, phycoerythrin, phycocyanin, allophycocyanin, ophthaldehyde and fluorescanine.

[0358] The antibody can also be detectably labeled using fluorescence emitting metals such as ¹⁵²Eu, or others of the lanthanide series. These metals can be attached to the antibody using such metal chelating groups as diethylenetriaminepentacetic acid (DTPA) or ethylenediaminetetraacetic acid (EDTA).

[0359] The antibody also can be detectably labeled by coupling it to a chemiluminescent compound. The presence of the chemiluminescent-tagged antibody is then determined by detecting the presence of luminescence that arises during the course of a chemical reaction. Examples of particularly useful chemiluminescent labeling compounds are luminol, isoluminol, theromatic acridinium ester, imidazole, acridinium salt and oxalate ester.

[0360] Likewise, a bioluminescent compound may be used to label the antibody of the present invention. Bioluminescence is a type of chemiluminescence found in biological systems in, which a catalytic protein increases the efficiency of the chemiluminescent reaction. The presence of a bioluminescent protein is determined by detecting the presence of luminescence. Important bioluminescent compounds for purposes of labeling are luciferin, luciferase and aequorin.

[0361] Methods for Detecting Lung Cancer

[0362] In general, a lung disease or cancer may be detected in a patient based on the presence of one or more lung cancer antigen proteins of the invention and/or polynucleotides encoding such proteins in a biological sample (for example, blood, sera, urine, and/or tumor biopsies) obtained from the patient. In other words, such proteins and/or polynucleotides may be used as markers to indicate the presence or absence of a lung disease or disorder, including cancer. Cancers that may be diagnosed, and/or prognosed using the compositions of the invention include but are not limited to, lung cancer. The binding agents provided herein generally permit detection of the level of antigen that binds to the agent in the biological sample. Polynucleotide primers and probes may be used to detect the level of mRNA encoding lung cancer antigen polypeptides, which is also indicative of the presence or absence of a lung disease or disorder, including cancer. In general, lung cancer antigen polypeptides should be present at a level that is at least three fold higher in diseased tissue than in normal tissue.

[0363] There are a variety of assay formats known to those of ordinary skill in the art for using a binding agent to detect polypeptide markers in a sample. See, e.g., Harlow and Lane, supra. In general, the presence or absence of a lung disease in a patient may be determined by (a) contacting a biological sample obtained from a patient with a binding agent; (b) detecting in the sample a level of polypeptide that binds to the binding agent; and (c) comparing the level of polypeptide with a predetermined cut-off value.

[0364] In a preferred embodiment, the assay involves the use of binding agent immobilized on a solid support to bind to and remove the lung cancer antigen polypeptide of the invention from the remainder of the sample. The bound polypeptide may then be detected using a detection reagent that contains a reporter group and specifically binds to the binding agent/polypeptide complex. Such detection reagents may comprise, for example, a binding agent that specifically binds to the polypeptide or an antibody or other agent that specifically binds to the binding agent, such as an anti-immunoglobulin, protein G, protein A or a lectin. Alternatively, a competitive assay may be utilized, in which a polypeptide is labeled with a reporter group and allowed to bind to the immobilized binding agent after incubation of the binding agent with the sample. The extent to which components of the sample inhibit the binding of the labeled polypeptide to the binding agent is indicative of the reactivity of the sample with the immobilized binding agent. Suitable polypeptides for use within such assays include lung cancer antigen polypeptides and portions thereof, or antibodies, to which the binding agent binds, as described above.

[0365] The solid support may be any material known to those of skill in the art to which lung cancer antigen polypeptides of the invention may be attached. For example, the solid support may be a test well in a microtiter plate or a nitrocellulose or other suitable membrane. Alternatively, the support may be a bead or disc, such as glass fiberglass, latex or a plastic material such as polystyrene or polyvinylchloride. The support may also be a magnetic particle or a fiber optic sensor, such as those disclosed, for example, in U.S. Pat. No. 5,359,681. The binding agent may be immobilized on the solid support using a variety of techniques known to those of skill in the art, which are amply described in the patent and scientific literature. In the context of the present invention, the term “immobilization” refers to both noncovalent association, such as adsorption, and covalent attachment (which may be a direct linkage between the agent and functional groups on the support or may be a linkage by way of a cross-linking agent). Immobilization by adsorption to a well in a microtiter plate or to a membrane is preferred. In such cases, adsorption may be achieved by contacting the binding agent, in a suitable buffer, with the solid support for the suitable amount of time. The contact time varies with temperature, but is typically between about 1 hour and about 1 day. In general, contacting a well of plastic microtiter plate (such as polystyrene or polyvinylchloride) with an amount of binding agent ranging from about 10 ng to about 10 ug, and preferably about 100 ng to about 1 ug, is sufficient to immobilize an adequate amount of binding agent.

[0366] Covalent attachment of binding agent to a solid support may generally be achieved by first reacting the support with a bifunctional reagent that will react with both the support and a functional group, such as a hydroxyl or amino group, on the binding agent. For example, the binding agent may be covalently attached to supports having an appropriate polymer coating using benzoquinone or by condensation of an aldehyde group on the support with an amine and an active hydrogen on the binding partner (see, e.g., Pierce Immunotechnology Catalog and Handbook, 1991, at A12-A13). Gene Therapy Methods

[0367] Another aspect of the present invention is to gene therapy methods for treating or preventing disorders, diseases and conditions. The gene therapy methods relate to the introduction of nucleic acid (DNA, RNA and antisense DNA or RNA) sequences into an animal to achieve expression of the polypeptide of the present invention. This method requires a polynucleotide which codes for a polypeptide of the present invention operatively linked to a promoter and any other genetic elements necessary for the expression of the polypeptide by the target tissue. Such gene therapy and delivery techniques are known in the art, see, for example, WO90/11092, which is herein incorporated by reference.

[0368] Thus, for example, cells from a patient may be engineered with a polynucleotide (DNA or RNA) comprising a promoter operably linked to a polynucleotide of the present invention ex vivo, with the engineered cells then being provided to a patient to be treated with the polypeptide of the present invention. Such methods are well-known in the art. For example, see Belldegrun, A., et al., J. Natl. Cancer Inst. 85: 207-216 (1993); Ferrantini, M. et al., Cancer Research 53: 1107-1112 (1993); Ferrantini, M. et al., J. Immunology 153: 4604-4615 (1994); Kaido, T., et al., Int. J. Cancer 60: 221-229 (1995); Ogura, H., et al., Cancer Research 50: 5102-5106 (1990); Santodonato, L., et al., Human Gene Therapy 7:1-10 (1996); Santodonato, L., et al., Gene Therapy 4:1246-1255 (1997); and Zhang, J.-F. et al., Cancer Gene Therapy 3: 31-38 (1996)), which are herein incorporated by reference. In one embodiment, the cells which are engineered are arterial cells. The arterial cells may be reintroduced into the patient through direct injection to the artery, the tissues surrounding the artery, or through catheter injection.

[0369] As discussed in more detail below, the polynucleotide constructs can be delivered by any method that delivers injectable materials to the cells of an animal, such as, injection into the interstitial space of tissues (heart, muscle, skin, lung, liver, and the like). The polynucleotide constructs may be delivered in a pharmaceutically acceptable liquid or aqueous carrier.

[0370] In one embodiment, the polynucleotide of the present invention is delivered as a naked polynucleotide. The term “naked” polynucleotide, DNA or RNA refers to sequences that are free from any delivery vehicle that acts to assist, promote or facilitate entry into the cell, including viral sequences, viral particles, liposome formulations, lipofectin or precipitating agents and the like. However, the polynucleotide of the present invention can also be delivered in liposome formulations and lipofectin formulations and the like can be prepared by methods well known to those skilled in the art. Such methods are described, for example, in U.S. Pat. Nos. 5,593,972, 5,589,466, and 5,580,859, which are herein incorporated by reference.

[0371] The polynucleotide vector constructs used in the gene therapy method are preferably constructs that will not integrate into the host genome nor will they contain sequences that allow for replication. Appropriate vectors include pWLNEO, pSV2CAT, pOG44, pXT1 and pSG available from Stratagene; pSVK3, pBPV, pMSG and pSVL available from Pharmacia; and pEF1/V5, pcDNA3.1, and pRc/CMV2 available from Invitrogen. Other suitable vectors will be readily apparent to the skilled artisan.

[0372] Any strong promoter known to those skilled in the art can be used for driving the expression of the polynucleotide sequence. Suitable promoters include adenoviral promoters, such as the adenoviral major late promoter; or heterologous promoters, such as the cytomegalovirus (CMV) promoter; the respiratory syncytial virus (RSV) promoter; inducible promoters, such as the MMT promoter, the metallothionein promoter; heat shock promoters; the albumin promoter; the ApoAl promoter; human globin promoters; viral thymidine kinase promoters, such as the Herpes Simplex thymidine kinase promoter; retroviral LTRs; the b-actin promoter; and human growth hormone promoters. The promoter also may be the native promoter for the polynucleotide of the present invention.

[0373] Unlike other gene therapy techniques, one major advantage of introducing naked nucleic acid sequences into target cells is the transitory nature of the polynucleotide synthesis in the cells. Studies have shown that non-replicating DNA sequences can be introduced into cells to provide production of the desired polypeptide for periods of up to six months.

[0374] The polynucleotide construct can be delivered to the interstitial space of tissues within the an animal, including of muscle, skin, brain, lung, liver, spleen, bone marrow, thymus, heart, lymph, blood, bone, cartilage, pancreas, kidney, gall bladder, stomach, intestine, testis, ovary, uterus, rectum, nervous system, eye, gland, and connective tissue. Interstitial space of the tissues comprises the intercellular, fluid, mucopolysaccharide matrix among the reticular fibers of organ tissues, elastic fibers in the walls of vessels or chambers, collagen fibers of fibrous tissues, or that same matrix within connective tissue ensheathing muscle cells or in the lacunae of bone. It is similarly the space occupied by the plasma of the circulation and the lymph fluid of the lymphatic channels. Delivery to the interstitial space of muscle tissue is preferred for the reasons discussed below. They may be conveniently delivered by injection into the tissues comprising these cells. They are preferably delivered to and expressed in persistent, non-dividing cells which are differentiated, although delivery and expression may be achieved in non-differentiated or less completely differentiated cells, such as, for example, stem cells of blood or skin fibroblasts. In vivo muscle cells are particularly competent in their ability to take up and express polynucleotides.

[0375] For the naked nucleic acid sequence injection, an effective dosage amount of DNA or RNA will be in the range of from about 0.05 mg/kg body weight to about 50 mg/kg body weight. Preferably the dosage will be from about 0.005 mg/kg to about 20 mg/kg and more preferably from about 0.05 mg/kg to about 5 mg/kg. Of course, as the artisan of ordinary skill will appreciate, this dosage will vary according to the tissue site of injection. The appropriate and effective dosage of nucleic acid sequence can readily be determined by those of ordinary skill in the art and may depend on the condition being treated and the route of administration.

[0376] The preferred route of administration is by the parenteral route of injection into the interstitial space of tissues. However, other parenteral routes may also be used, such as, inhalation of an aerosol formulation particularly for delivery to lungs or bronchial tissues, throat or mucous membranes of the nose. In addition, naked DNA constructs can be delivered to arteries during angioplasty by the catheter used in the procedure.

[0377] The naked polynucleotides are delivered by any method known in the art, including, but not limited to, direct needle injection at the delivery site, intravenous injection, topical administration, catheter infusion, and so-called “gene guns”. These delivery methods are known in the art.

[0378] The constructs may also be delivered with delivery vehicles such as viral sequences, viral particles, liposome formulations, lipofectin, precipitating agents, etc. Such methods of delivery are known in the art.

[0379] In certain embodiments, the polynucleotide constructs are complexed in a liposome preparation. Liposomal preparations for use in the instant invention include cationic (positively charged), anionic (negatively charged) and neutral preparations. However, cationic liposomes are particularly preferred because a tight charge complex can be formed between the cationic liposome and the polyanionic nucleic acid. Cationic liposomes have been shown to mediate intracellular delivery of plasmid DNA (Felgner et al., Proc. Natl. Acad. Sci. USA (1987) 84:7413-7416, which is herein incorporated by reference); mRNA (Malone et al., Proc. Natl. Acad. Sci. USA (1989) 86:6077-6081, which is herein incorporated by reference); and purified transcription factors (Debs et al., J. Biol. Chem. (1990) 265:10189-10192, which is herein incorporated by reference), in functional form.

[0380] Cationic liposomes are readily available. For example, N[1-2,3-dioleyloxy)propyl]-N,N,N-triethylammonium (DOTMA) liposomes are particularly useful and are available under the trademark Lipofectin, from GIBCO BRL, Grand Island, N.Y. (See, also, Felgner et al., Proc. Natl Acad. Sci. USA (1987) 84:7413-7416, which is herein incorporated by reference). Other commercially available liposomes include transfectace (DDAB/DOPE) and DOTAP/DOPE (Boehringer).

[0381] Other cationic liposomes can be prepared from readily available materials using techniques well known in the art. See, e.g. PCT Publication No. WO 90/11092 (which is herein incorporated by reference) for a description of the synthesis of DOTAP (1,2-bioleoyloxy)-3-(trimethylammonio)propane) liposomes. Preparation of DOTMA liposomes is explained in the literature, see, e.g., P. Felgner et al., Proc. Natl. Acad. Sci. USA 84:7413-7417, which is herein incorporated by reference. Similar methods can be used to prepare liposomes from other cationic lipid materials.

[0382] Similarly, anionic and neutral liposomes are readily available, such as from Avanti Polar Lipids (Birmingham, Ala.), or can be easily prepared using readily available materials. Such materials include phosphatidyl, choline, cholesterol, phosphatidyl ethanolamine, dioleoylphosphatidyl choline (DOPC), dioleoylphosphatidyl glycerol (DOPG), dioleoylphoshatidyl ethanolamine (DOPE), among others. These materials can also be mixed with the DOTMA and DOTAP starting materials in appropriate ratios. Methods for making liposomes using these materials are well known in the art.

[0383] For example, commercially dioleoylphosphatidyl choline (DOPC), dioleoylphosphatidyl glycerol (DOPG), and dioleoylphosphatidyl ethanolamine (DOPE) can be used in various combinations to make conventional liposomes, with or without the addition of cholesterol. Thus, for example, DOPG/DOPC vesicles can be prepared by drying 50 mg each of DOPG and DOPC under a stream of nitrogen gas into a sonication vial. The sample is placed under a vacuum pump overnight and is hydrated the following day with deionized water. The sample is then sonicated for 2 hours in a capped vial, using a Heat Systems model 350 sonicator equipped with an inverted cup (bath type) probe at the maximum setting while the bath is circulated at 1SEC. Alternatively, negatively charged vesicles can be prepared without sonication to produce multilamellar vesicles or by extrusion through nucleopore membranes to produce unilamellar vesicles of discrete size. Other methods are known and available to those of skill in the art.

[0384] The liposomes can comprise multilamellar vesicles (MLVs), small unilamellar vesicles (SUVs), or large unilamellar vesicles (LUVs), with SUVs being preferred. The various liposome-nucleic acid complexes are prepared using methods well known in the art. See, e.g., Straubinger et al., Methods of Immunology (1983), 101:512-527, which is herein incorporated by reference. For example, MLVs containing nucleic acid can be prepared by depositing a thin film of phospholipid on the walls of a glass tube and subsequently hydrating with a solution of the material to be encapsulated. SUVs are prepared by extended sonication of MLVs to produce a homogeneous population of unilamellar liposomes. The material to be entrapped is added to a suspension of preformed MLVs and then sonicated. When using liposomes containing cationic lipids, the dried lipid film is resuspended in an appropriate solution such as sterile water or an isotonic buffer solution such as 10 mM Tris/NaCl, sonicated, and then the preformed liposomes are mixed directly with the DNA. The liposome and DNA form a very stable complex due to binding of the positively charged liposomes to the cationic DNA. SUVs find use with small nucleic acid fragments. LUVs are prepared by a number of methods, well known in the art. Commonly used methods include Ca2+-EDTA chelation (Papahadjopoulos et al., Biochim. Biophys. Acta (1975) 394:483; Wilson et al., Cell (1979) 17:77); ether injection (Deamer, D. and Bangham, A., Biochim. Biophys. Acta (1976) 443:629; Ostro et al., Biochem. Biophys. Res. Commun. (1977) 76:836; Fraley et al., Proc. Natl. Acad. Sci. USA (1979) 76:3348); detergent dialysis (Enoch, H. and Strittmatter, P., Proc. Natl. Acad. Sci. USA (1979) 76:145); and reverse-phase evaporation (REV) (Fraley et al., J. Biol. Chem. (1980) 255:10431; Szoka, F. and Papahadjopoulos, D., Proc. Natl. Acad. Sci. USA (1978) 75:145; Schaefer-Ridder et al., Science (1982) 215:166), which are herein incorporated by reference.

[0385] Generally, the ratio of DNA to liposomes will be from about 10:1 to about 1:10. Preferably, the ration will be from about 5:1 to about 1:5. More preferably, the ration will be about 3:1 to about 1:3. Still more preferably, the ratio will be about 1:1.

[0386] U.S. Pat. No. 5,676,954 (which is herein incorporated by reference) reports on the injection of genetic material, complexed with cationic liposomes carriers, into nice. U.S. Pat. Nos. 4,897,355, 4,946,787, 5,049,386, 5,459,127, 5,589,466, 5,693,622, 5,580,859, 5,703,055, and international publication no. WO 94/9469 (which are herein incorporated by reference) provide cationic lipids for use in transfecting DNA into cells and mammals. U.S. Pat. Nos. 5,589,466, 5,693,622, 5,580,859, 5,703,055, and international publication no. WO 94/9469 (which are herein incorporated by reference) provide methods for delivering DNA-cationic lipid complexes to mammals.

[0387] In certain embodiments, cells are engineered, ex vivo or in vivo, using a retroviral particle containing RNA which comprises a sequence encoding a polypeptide of the present invention. Retroviruses from which the retroviral plasmid vectors may be derived include, but are not limited to, Moloney Murine Leukemia Virus, spleen necrosis virus, Rous sarcoma Virus, Harvey Sarcoma Virus, avian leukosis virus, gibbon ape leukemia virus, human immunodeficiency virus, Myeloproliferative Sarcoma Virus, and mammary tumor virus.

[0388] The retroviral plasmid vector is employed to transduce packaging cell lines to form producer cell lines. Examples of packaging cells which may be transfected include, but are not limited to, the PE501, PA317, R-2, R-AM, PA12, T19-14X, VT-19-17-H2, RCRE, RCRIP, GP+E-86, GP+envAml2, and DAN cell lines as described in Miller, Human Gene Therapy 1:5-14 (1990), which is incorporated herein by reference in its entirety. The vector may transduce the packaging cells through any means known in the art. Such means include, but are not limited to, electroporation, the use of liposomes, and CaPO₄ precipitation. In one alternative, the retroviral plasmid vector may be encapsulated into a liposome, or coupled to a lipid, and then administered to a host.

[0389] The producer cell line generates infectious retroviral vector particles which include polynucleotide encoding a polypeptide of the present invention. Such retroviral vector particles then may be employed, to transduce eukaryotic cells, either in vitro or in vivo. The transduced eukaryotic cells will express a polypeptide of the present invention.

[0390] In certain other embodiments, cells are engineered, ex vivo or in vivo, with polynucleotide contained in an adenovirus vector. Adenovirus can be manipulated such that it encodes and expresses a polypeptide of the present invention, and at the same time is inactivated in terms of its ability to replicate in a normal lytic viral life cycle. Adenovirus expression is achieved without integration of the viral DNA into the host cell chromosome, thereby alleviating concerns about insertional mutagenesis. Furthermore, adenoviruses have been used as live enteric vaccines for many years with an excellent safety profile (Schwartz, A. R. et al. (1974) Am. Rev. Respir. Dis.109:233-238). Finally, adenovirus mediated gene transfer has been demonstrated in a number of instances including transfer of alpha-1-antitrypsin and CFTR to the lungs of cotton rats (Rosenfeld, M. A. et al. (1991) Science 252:431-434; Rosenfeld et al., (1992) Cell 68:143-155). Furthermore, extensive studies to attempt to establish adenovirus as a causative agent in human cancer were uniformly negative (Green, M. et al. (1979) Proc. Natl. Acad. Sci. USA 76:6606).

[0391] Suitable adenoviral vectors useful in the present invention are described, for example, in Kozarsky and Wilson, Curr. Opin. Genet. Devel. 3:499-503 (1993); Rosenfeld et al., Cell 68:143-155 (1992); Engelhardt et al., Human Genet. Ther. 4:759-769 (1993); Yang et al., Nature Genet. 7:362-369 (1994); Wilson et al., Nature 365:691-692 (1993); and U.S. Pat. No. 5,652,224, which are herein incorporated by reference. For example, the adenovirus vector Ad2 is useful and can be grown in human 293 cells. These cells contain the E1 region of adenovirus and constitutively express E1a and E1b, which complement the defective adenoviruses by providing the products of the genes deleted from the vector. In addition to Ad2, other varieties of adenovirus (e.g., Ad3, Ad5, and Ad7) are also useful in the present invention.

[0392] Preferably, the adenoviruses used in the present invention are replication deficient. Replication deficient adenoviruses require the aid of a helper virus and/or packaging cell line to form infectious particles. The resulting virus is capable of infecting cells and can express a polynucleotide of interest which is operably linked to a promoter, but cannot replicate in most cells. Replication deficient adenoviruses may be deleted in one or more of all or a portion of the following genes: E1a, E1b, E3, E4, E2a, or L1 through L5.

[0393] In certain other embodiments, the cells are engineered, ex vivo or in vivo, using an adeno-associated virus (AAV). AAVs are naturally occurring defective viruses that require helper viruses to produce infectious particles (Muzyczka, N., Curr. Topics in Microbiol. Immunol. 158:97 (1992)). It is also one of the few viruses that may integrate its DNA into non-dividing cells. Vectors containing as little as 300 base pairs of AAV can be packaged and can integrate, but space for exogenous DNA is limited to about 4.5 kb. Methods for producing and using such AAVs are known in the art. See, for example, U.S. Pat. Nos. 5,139,941, 5,173,414, 5,354,678, 5,436,146, 5,474,935, 5,478,745, and 5,589,377.

[0394] For example, an appropriate AAV vector for use in the present invention will include all the sequences necessary for DNA replication, encapsidation, and host-cell integration. The polynucleotide construct is inserted into the AAV vector using standard cloning methods, such as those found in Sambrook et al., Molecular Cloning: A Laboratory Manual, Cold Spring Harbor Press (1989). The recombinant AAV vector is then transfected into packaging cells which are infected with a helper virus, using any standard technique, including lipofection, electroporation, calcium phosphate precipitation, etc. Appropriate helper viruses include adenoviruses, cytomegaloviruses, vaccinia viruses, or herpes viruses. Once the packaging cells are transfected and infected, they will produce infectious AAV viral particles which contain the polynucleotide construct. These viral particles are then used to transduce eukaryotic cells, either ex vivo or in vivo. The transduced cells will contain the polynucleotide construct integrated into its genome, and will express a polypeptide of the invention.

[0395] Another method of gene therapy involves operably associating heterologous control regions and endogenous polynucleotide sequences (e.g. encoding a polypeptide of the present invention) via homologous recombination (see, e.g., U.S. Pat. No. 5,641,670, issued Jun. 24, 1997; International Publication No. WO 96/29411, published Sep. 26, 1996; International Publication No. WO 94/12650, published Aug. 4, 1994; Koller et al., Proc. Natl. Acad. Sci. USA 86:8932-8935 (1989); and Zijlstra et al., Nature 342:435-438 (1989). This method involves the activation of a gene which is present in the target cells, but which is not normally expressed in the cells, or is expressed at a lower level than desired.

[0396] Polynucleotide constructs are made, using standard techniques known in the art, which contain the promoter with targeting sequences flanking the promoter. Suitable promoters are described herein. The targeting sequence is sufficiently complementary to an endogenous sequence to permit homologous recombination of the promoter-targeting sequence with the endogenous sequence. The targeting sequence will be sufficiently near the 5′ end of the desired endogenous polynucleotide sequence so the promoter will be operably linked to the endogenous sequence upon homologous recombination.

[0397] The promoter and the targeting sequences can be amplified using PCR. Preferably, the amplified promoter contains distinct restriction enzyme sites on the 5′ and 3′ ends. Preferably, the 3′ end of the first targeting sequence contains the same restriction enzyme site as the 5′ end of the amplified promoter and the 5′ end of the second targeting sequence contains the same restriction site as the 3′ end of the amplified promoter. The amplified promoter and targeting sequences are digested and ligated together.

[0398] The promoter-targeting sequence construct is delivered to the cells, either as naked polynucleotide, or in conjunction with transfection-facilitating agents, such as liposomes, viral sequences, viral particles, whole viruses, lipofection, precipitating agents, etc., described in more detail above. The P promoter-targeting sequence can be delivered by any method, included direct needle injection, intravenous injection, topical administration, catheter infusion, particle accelerators, etc. The methods are described in more detail below.

[0399] The promoter-targeting sequence construct is taken up by cells. Homologous recombination between the construct and the endogenous sequence takes place, such that an endogenous sequence is placed under the control of the promoter. The promoter then drives the expression of the endogenous sequence.

[0400] Preferably, the polynucleotide encoding a polypeptide of the present invention contains a secretory signal sequence that facilitates secretion of the protein. Typically, the signal sequence is positioned in the coding region of the polynucleotide to be expressed towards or at the 5′ end of the coding region. The signal sequence may be homologous or heterologous to the polynucleotide of interest and may be homologous or heterologous to the cells to be transfected. Additionally, the signal sequence may be chemically synthesized using methods known in the art.

[0401] Any mode of administration of any of the above-described polynucleotides constructs can be used so long as the mode results in the expression of one or more molecules in an amount sufficient to provide a therapeutic effect. This includes direct needle injection, systemic injection, catheter infusion, biolistic injectors, particle accelerators (i.e., “gene guns”), gelfoam sponge depots, other commercially available depot materials, osmotic pumps (e.g., Alza minipumps), oral or suppositorial solid (tablet or pill) pharmaceutical formulations, and decanting or topical applications during surgery. For example, direct injection of naked calcium phosphate-precipitated plasmid into rat liver and rat spleen or a protein-coated plasmid into the portal vein has resulted in gene expression of the foreign gene in the rat livers (Kaneda et al., Science 243:375 (1989)).

[0402] A preferred method of local administration is by direct injection. Preferably, a recombinant molecule of the present invention complexed with a delivery vehicle is administered by direct injection into or locally within the area of arteries. Administration of a composition locally within the area of arteries refers to injecting the composition centimeters and preferably, millimeters within arteries.

[0403] Another method of local administration is to contact a polynucleotide construct of the present invention in or around a surgical wound. For example, a patient can undergo surgery and the polynucleotide construct can be coated on the surface of tissue inside the wound or the construct can be injected into areas of tissue inside the wound.

[0404] Therapeutic compositions useful in systemic administration, include recombinant molecules of the present invention complexed to a targeted delivery vehicle of the present invention. Suitable delivery vehicles for use with systemic administration comprise liposomes comprising ligands for targeting the vehicle to a particular site.

[0405] Preferred methods of systemic administration, include intravenous injection, aerosol, oral and percutaneous (topical) delivery. Intravenous injections can be performed using methods standard in the art. Aerosol delivery can also be performed using methods standard in the art (see, for example, Stribling et al., Proc. Natl. Acad. Sci. USA 189:11277-11281, 1992, which is incorporated herein by reference). Oral delivery can be performed by complexing a polynucleotide construct of the present invention to a carrier capable of withstanding degradation by digestive enzymes in the gut of an animal. Examples of such carriers, include plastic capsules or tablets, such as those known in the art. Topical delivery can be performed by mixing a polynucleotide construct of the present invention with a lipophilic reagent (e.g., DMSO) that is capable of passing into the skin.

[0406] Determining an effective amount of substance to be delivered can depend upon a number of factors including, for example, the chemical structure and biological activity of the substance, the age and weight of the animal, the precise condition requiring treatment and its severity, and the route of administration. The frequency of treatments depends upon a number of factors, such as the amount of polynucleotide constructs administered per dose, as well as the health and history of the subject. The precise amount, number of doses, and timing of doses will be determined by the attending physician or veterinarian.

[0407] Therapeutic compositions of the present invention can be administered to any animal, preferably to mammals and birds. Preferred mammals include humans, dogs, cats, mice, rats, rabbits sheep, cattle, horses and pigs, with humans being particularly preferred.

[0408] Biological Activities

[0409] Polynucleotides or polypeptides, or agonists or antagonists of the present invention, can be used in assays to test for one or more biological activities. If these polynucleotides or polypeptides, or agonists or antagonists of the present invention, do exhibit activity in a particular assay, it is likely that these molecules may be involved in the diseases associated with the biological activity. Thus, the polynucleotides and polypeptides, and agonists or antagonists could be used to treat, prevent diagnose and/or prognose the associated disease.

[0410] The lung cancer antigen polynucleotides and polypeptides of the invention are predicted to have predominant expression in lung tissues.

[0411] Thus, the lung cancer antigens of the invention (e.g., polynucleotides of the invention (e.g., nucleotide coding sequence in SEQ ID NO:X, the nucleotide coding sequence of the related cDNA contained in a deposited library or fragments or variants thereof), polypeptides of the invention (e.g., the polypeptide of SEQ ID NO:Y, a polypeptide encoded by SEQ ID NO:X, a polypeptide encoded by the cDNA in the related cDNA clone contained in a deposited library, and/or fragments or variants thereof), and/or an antibody, or fragment thereof, directed to a polypeptide of the invention) may be useful as therapeutic molecules. Each would be useful for diagnosis, detection, treatment and/or prevention of diseases or disorders of the lung, including but not limited to small cell lung cancer, non-small cell lung cancer (e.g., squamous cell carcinoma (also called epidermoid carcinoma), adenocarcinoma, large cell carcinoma, adenosquamous carcinoma, and undifferentiated carcinoma), lung cancer metastases, and/or as described under “Hyperproliferative Disorders” and “Respiratory Disorders” below.

[0412] Particularly, the lung cancer antigens may be a useful therapeutic for lung cancer. Treatment, diagnosis, detection, and/or prevention of lung disorders could be carried out using a lung cancer antigen or soluble form of a lung cancer antigen, a lung cancer antigen ligand, gene therapy, or ex vivo applications. Moreover, inhibitors of a lung cancer antigen, either blocking antibodies or mutant forms, could modulate the expression of the lung cancer antigen. These inhibitors may be useful to treat, diagnose, detect, and/or prevent diseases associated with the misregulation of a lung cancer antigen.

[0413] In one embodiment, the invention provides a method for the specific delivery of compositions of the invention to cells (e.g., normal or diseased lung cells) by administering polypeptides of the invention (e.g., lung cancer antigen polypeptides or anti-lung cancer antigen antibodies) that are associated with heterologous polypeptides or nucleic acids. In one example, the invention provides a method for delivering a therapeutic protein into the targeted cell (e.g., an aberrant lung cell or lung cancer cell). In another example, the invention provides a method for delivering a single stranded nucleic acid (e.g., antisense or ribozymes) or double stranded nucleic acid (e.g., DNA that can integrate into the cell's genome or replicate episomally and that can be transcribed) into the targeted cell.

[0414] In another embodiment, the invention provides a method for the specific destruction of cells (e.g., the destruction of aberrant lung cells, including, but not limited to, lung tumor cells) by administering polypeptides of the invention (e.g., lung cancer antigen polypeptides or fragments thereof, or anti-lung cancer antigen antibodies) in association with toxins or cytotoxic prodrugs.

[0415] By “toxin” is meant compounds that bind and activate endogenous cytotoxic effector systems, radioisotopes, holotoxins, modified toxins, catalytic subunits of toxins, cytotoxins (cytotoxic agents), or any molecules or enzymes not normally present in or on the surface of a cell that under defined conditions cause the cell's death. Toxins that may be used according to the methods of the invention include, but are not limited to, radioisotopes known in the art, compounds such as, for example, antibodies (or complement fixing containing portions thereof) that bind an inherent or induced endogenous cytotoxic effector system, thymidine kinase, endonuclease, RNAse, alpha toxin, ricin, abrin, Pseudomonas exotoxin A, diphtheria toxin, saporin, momordin, gelonin, pokeweed antiviral protein, alpha-sarcin and cholera toxin. “Toxin” also includes a cytostatic or cytocidal agent, a therapeutic agent or a radioactive metal ion, e.g., alpha-emitters such as, for example, ²¹³Bi, or other radioisotopes such as, for example, ¹⁰³Pd, ¹³³Xe, ¹³¹I, ⁶⁸G, ⁵⁷Co, ⁶⁵Zn, ⁸⁵Sr, ³²P, ³⁵S, ⁹⁰Y, ¹⁵³Sm, ¹⁵³Gd, ¹⁶⁹Yb, ⁵¹Cr, ⁵⁴Mn, ⁷⁵Se, ¹¹³Sn, ⁹⁰Yttrium, ¹¹⁷Tin, ¹⁸⁶Rhenium, ¹⁶⁶Holmium, and ¹⁸⁸Rhenium; luminescent labels, such as luminol; and fluorescent labels, such as fluorescein and rhodamine, and biotin.

[0416] Techniques known in the art may be applied to label antibodies of the invention. Such techniques include, but are not limited to, the use of bifunctional conjugating agents (see e.g., U.S. Pat. Nos. 5,756,065; 5,714,631; 5,696,239; 5,652,361; 5,505,931; 5,489,425; 5,435,990; 5,428,139; 5,342,604; 5,274,119; 4,994,560; and 5,808,003; the contents of each of which are hereby incorporated by reference in its entirety). A cytotoxin or cytotoxic agent includes any agent that is detrimental to cells. Examples include paclitaxol, cytochalasin B, gramicidin D, ethidium bromide, emetine, mitomycin, etoposide, tenoposide, vincristine, vinblastine, colchicin, doxorubicin, daunorubicin, dihydroxy anthracin dione, mitoxantrone, mithramycin, actinomycin D, 1-dehydrotestosterone, glucocorticoids, procaine, tetracaine, lidocaine, propranolol, and puromycin and analogs or homologs thereof. Therapeutic agents include, but are not limited to, antimetabolites (e.g., methotrexate, 6-mercaptopurine, 6-thioguanine, cytarabine, 5-fluorouracil decarbazine), alkylating agents (e.g., mechlorethamine, thioepa chlorambucil, melphalan, carmustine (BSNU) and lomustine (CCNU), cyclothosphamide, busulfan, dibromomannitol, streptozotocin, mitomycin C, and cis-dichlorodiamine platinum (II) (DDP) cisplatin), anthracyclines (e.g., daunorubicin (formerly daunomycin) and doxorubicin), antibiotics (e.g., dactinomycin (formerly actinomycin), bleomycin, mithramycin, and anthramycin (AMC)), and anti-mitotic agents (e.g., vincristine and vinblastine).

[0417] By “cytotoxic prodrug” is meant a non-toxic compound that is converted by an enzyme, normally present in the cell, into a cytotoxic compound. Cytotoxic prodrugs that may be used according to the methods of the invention include, but are not limited to, glutamyl derivatives of benzoic acid mustard alkylating agent, phosphate derivatives of etoposide or mitomycin C, cytosine arabinoside, daunorubisin, and phenoxyacetamide derivatives of doxorubicin.

[0418] It will be appreciated that conditions caused by a decrease in the standard or normal level of a lung cancer antigen activity in an individual, particularly disorders of the lung, can be treated by administration of a lung cancer antigen polypeptide (e.g., such as, for example, the complete lung cancer antigen polypeptide, the soluble form of the extracellular domain of a lung cancer antigen polypeptide, or cells expressing the complete protein) or agonist. Thus, the invention also provides a method of treatment of an individual in need of an increased level of lung cancer antigen activity comprising administering to such an individual a pharmaceutical composition comprising an amount of an isolated lung cancer antigen polypeptide of the invention, or agonist thereof (e.g., an agonistic anti-lung cancer antigen antibody), effective to increase the lung cancer antigen activity level in such an individual.

[0419] It will also be appreciated that conditions caused by a increase in the standard or normal level of lung cancer antigen activity in an individual, particularly disorders of the lung, can be treated by administration of lung cancer antigen polypeptides (e.g., such as, for example, the complete lung cancer antigen polypeptide, the soluble form of the extracellular domain of a lung cancer antigen polypeptide, or cells expressing the complete protein) or antagonist (e.g., an antagonistic lung cancer antigen antibody). Thus, the invention also provides a method of treatment of an individual in need of an decreased level of lung cancer antigen activity comprising administering to such an individual a pharmaceutical composition comprising an amount of an isolated lung cancer antigen polypeptide of the invention, or antagonist thereof (e.g., an antagonistic anti-lung cancer antigen antibody), effective to decrease the lung cancer antigen activity level in such an individual.

[0420] More generally, polynucleotides, translation products and antibodies corresponding to this gene may be useful for the diagnosis, prognosis, prevention, and/or treatment of diseases and/or disorders associated with the following systems.

[0421] Respiratory Disorders

[0422] Polynucleotides or polypeptides, or agonists or antagonists of the present invention may be used to treat, prevent, diagnose, and/or prognose diseases and/or disorders of the respiratory system.

[0423] Diseases and disorders of the respiratory system include, but are not limited to, nasal vestibulitis, nonallergic rhinitis (e.g., acute rhinitis, chronic rhinitis, atrophic rhinitis, vasomotor rhinitis), nasal polyps, and sinusitis, juvenile angiofibromas, cancer of the nose and juvenile papillomas, vocal cord polyps, nodules (singer's nodules), contact ulcers, vocal cord paralysis, laryngoceles, pharyngitis (e.g., viral and bacterial), tonsillitis, tonsillar cellulitis, parapharyngeal abscess, laryngitis, laryngoceles, and throat cancers (e.g., cancer of the nasopharynx, tonsil cancer, larynx cancer), lung cancer (e.g., squamous cell carcinoma, small cell (oat cell) carcinoma, large cell carcinoma, and adenocarcinoma), allergic disorders (eosinophilic pneumonia, hypersensitivity pneumonitis (e.g., extrinsic allergic alveolitis, allergic interstitial pneumonitis, organic dust pneumoconiosis, allergic bronchopulmonary aspergillosis, asthma, Wegener's granulomatosis (granulomatous vasculitis), Goodpasture's syndrome)), pneumonia (e.g., bacterial pneumonia (e.g., Streptococcus pneumoniae (pneumoncoccal pneumonia), Staphylococcus aureus (staphylococcal pneumonia), Gram-negative bacterial pneumonia (caused by, e.g., Klebsiella and Pseudomas spp.), Mycoplasma pneumoniae pneumonia, Hemophilus influenzae pneumonia, Legionella pneumophila (Legionnaires' disease), and Chlamydia psittaci (Psittacosis)), and viral pneumonia (e.g., influenza, chickenpox (varicella).

[0424] Additional diseases and disorders of the respiratory system include, but are not limited to bronchiolitis, polio (poliomyelitis), croup, respiratory syncytial viral infection, mumps, erythema infectiosum (fifth disease), roseola infantum, progressive rubella panencephalitis, german measles, and subacute sclerosing panencephalitis), fungal pneumonia (e.g., Histoplasmosis, Coccidioidomycosis, Blastomycosis, fungal infections in people with severely suppressed immune systems (e.g., cryptococcosis, caused by Cryptococcus neoformans; aspergillosis, caused by Aspergillus spp.; candidiasis, caused by Candida; and mucormycosis)), Pneumocystis carinii (pneumocystis pneumonia), atypical pneumonias (e.g., Mycoplasma and Chlamydia spp.), opportunistic infection pneumonia, nosocomial pneumonia, chemical pneumonitis, and aspiration pneumonia, pleural disorders (e.g., pleurisy, pleural effusion, and pneumothorax (e.g., simple spontaneous pneumothorax, complicated spontaneous pneumothorax, tension pneumothorax)), obstructive airway diseases (e.g., asthma, chronic obstructive pulmonary disease (COPD), emphysema, chronic or acute bronchitis), occupational lung diseases (e.g., silicosis, black lung (coal workers' pneumoconiosis), asbestosis, berylliosis, occupational asthsma, byssinosis, and benign pneumoconioses), Infiltrative Lung Disease (e.g., pulmonary fibrosis (e.g., fibrosing alveolitis, usual interstitial pneumonia), idiopathic pulmonary fibrosis, desquamative interstitial pneumonia, lymphoid interstitial pneumonia, histiocytosis X (e.g., Letterer-Siwe disease, Hand-Schüller-Christian disease, eosinophilic granuloma), idiopathic pulmonary hemosiderosis, sarcoidosis and pulmonary alveolar proteinosis), Acute respiratory distress syndrome (also called, e.g., adult respiratory distress syndrome), edema, pulmonary embolism, bronchitis (e.g., viral, bacterial), bronchiectasis, atelectasis, lung abscess (caused by, e.g., Staphylococcus aureus or Legionella pneumophila), and cystic fibrosis.

[0425] Immune Activity

[0426] Polynucleotides, polypeptides, antibodies, and/or agonists or antagonists of the present invention may be useful in treating, preventing, diagnosing and/or prognosing diseases, disorders, and/or conditions of the immune system, by, for example, activating or inhibiting the proliferation, differentiation, or mobilization (chemotaxis) of immune cells. Immune cells develop through a process called hematopoiesis, producing myeloid (platelets, red blood cells, neutrophils, and macrophages) and lymphoid (B and T lymphocytes) cells from pluripotent stem cells. The etiology of these immune diseases, disorders, and/or conditions may be genetic, somatic, such as cancer and some autoimmune diseases, acquired (e.g., by chemotherapy or toxins), or infectious. Moreover, polynucleotides, polypeptides, antibodies, and/or agonists or antagonists of the present invention can be used as a marker or detector of a particular immune system disease or disorder.

[0427] Polynucleotides, polypeptides, antibodies, and/or agonists or antagonists of the present invention may be useful in treating, preventing, diagnosing, and/or prognosing immunodeficiencies, including both congenital and acquired immunodeficiencies. Examples of B cell immunodeficiencies in which immunoglobulin levels B cell function and/or B cell numbers are decreased include: X-linked agammaglobulinemia (Bruton's disease), X-linked infantile agammaglobulinemia, X-linked immunodeficiency with hyper IgM, non X-linked immunodeficiency with hyper IgM, X-linked lymphoproliferative syndrome (XLP), agammaglobulinemia including congenital and acquired agammaglobulinemia, adult onset agammaglobulinemia, late-onset agammaglobulinemia, dysgammaglobulinemia, hypogammaglobulinemia, unspecified hypogammaglobulinemia, recessive agammaglobulinemia (Swiss type), Selective IgM deficiency, selective IgA deficiency, selective IgG subclass deficiencies, IgG subclass deficiency (with or without IgA deficiency), Ig deficiency with increased IgM, IgG and IgA deficiency with increased IgM, antibody deficiency with normal or elevated Igs, Ig heavy chain deletions, kappa chain deficiency, B cell lymphoproliferative disorder (BLPD), common variable immunodeficiency (CVID), common variable immunodeficiency (CVI) (acquired), and transient hypogammaglobulinemia of infancy.

[0428] In specific embodiments, ataxia-telangiectasia or conditions associated with ataxia-telangiectasia are treated, prevented, diagnosed, and/or prognosing using the polypeptides or polynucleotides of the invention, and/or agonists or antagonists thereof.

[0429] Examples of congenital immunodeficiencies in which T cell and/or B cell function and/or number is decreased include, but are not limited to: DiGeorge anomaly, severe combined immunodeficiencies (SCID) (including, but not limited to, X-linked SCID, autosomal recessive SCID, adenosine deaminase deficiency, purine nucleoside phosphorylase (PNP) deficiency, Class II MHC deficiency (Bare lymphocyte syndrome), Wiskott-Aldrich syndrome, and ataxia telangiectasia), thymic hypoplasia, third and fourth pharyngeal pouch syndrome, 22q11.2 deletion, chronic mucocutaneous candidiasis, natural killer cell deficiency (NK), idiopathic CD4+ T-lymphocytopenia, immunodeficiency with predominant T cell defect (unspecified), and unspecified immunodeficiency of cell mediated immunity.

[0430] In specific embodiments, DiGeorge anomaly or conditions associated with DiGeorge anomaly are treated, prevented, diagnosed, and/or prognosed using polypeptides or polynucleotides of the invention, or antagonists or agonists thereof.

[0431] Other immunodeficiencies that may be treated, prevented, diagnosed, and/or prognosed using polypeptides or polynucleotides of the invention, and/or agonists or antagonists thereof, include, but are not limited to, chronic granulomatous disease, Chediak-Higashi syndrome, myeloperoxidase deficiency, leukocyte glucose-6-phosphate dehydrogenase deficiency, X-linked lymphoproliferative syndrome (XLP), leukocyte adhesion deficiency, complement component deficiencies (including C1, C2, C3, C4, C5, C6, C7, C8 and/or C9 deficiencies), reticular dysgenesis, thymic alymphoplasia-aplasia, immunodeficiency with thymoma, severe congenital leukopenia, dysplasia with immunodeficiency, neonatal neutropenia, short limbed dwarfism, and Nezelof syndrome-combined immunodeficiency with Igs.

[0432] In a preferred embodiment, the immunodeficiencies and/or conditions associated with the immunodeficiencies recited above are treated, prevented, diagnosed and/or prognosed using polynucleotides, polypeptides, antibodies, and/or agonists or antagonists of the present invention.

[0433] In a preferred embodiment polynucleotides, polypeptides, antibodies, and/or agonists or antagonists of the present invention could be used as an agent to boost immunoresponsiveness among immunodeficient individuals. In specific embodiments, polynucleotides, polypeptides, antibodies, and/or agonists or antagonists of the present invention could be used as an agent to boost immunoresponsiveness among B cell and/or T cell immunodeficient individuals.

[0434] The polynucleotides, polypeptides, antibodies, and/or agonists or antagonists of the present invention may be useful in treating, preventing, diagnosing and/or prognosing autoimmune disorders. Many autoimmune disorders result from inappropriate recognition of self as foreign material by immune cells. This inappropriate recognition results in an immune response leading to the destruction of the host tissue. Therefore, the administration of polynucleotides and polypeptides of the invention that can inhibit an immune response, particularly the proliferation, differentiation, or chemotaxis of T-cells, may be an effective therapy in preventing autoimmune disorders.

[0435] Autoimmune diseases or disorders that may be treated, prevented, diagnosed and/or prognosed by polynucleotides, polypeptides, antibodies, and/or agonists or antagonists of the present invention include, but are not limited to, one or more of the following: systemic lupus erythematosus, rheumatoid arthritis, ankylosing spondylitis, multiple sclerosis, autoimmune thyroiditis, Hashimoto's thyroiditis, autoimmune hemolytic anemia, hemolytic anemia, thrombocytopenia, autoimmune thrombocytopenia purpura, autoimmune neonatal thrombocytopenia, idiopathic thrombocytopenia purpura, purpura (e.g., Henloch-Scoenlein purpura), autoimmunocytopenia, Goodpasture's syndrome, Pemphigus vulgaris, myasthenia gravis, Grave's disease (hyperthyroidism), and insulin-resistant diabetes mellitus.

[0436] Additional disorders that are likely to have an autoimmune component that may be treated, prevented, and/or diagnosed with the compositions of the invention include, but are not limited to, type II collagen-induced arthritis, antiphospholipid syndrome, dermatitis, allergic encephalomyelitis, myocarditis, relapsing polychondritis, rheumatic heart disease, neuritis, uveitis ophthalmia, polyendocrinopathies, Reiter's Disease, Stiff-Man Syndrome, autoimmune pulmonary inflammation, autism, Guillain-Barre Syndrome, insulin dependent diabetes mellitus, and autoimmune inflammatory eye disorders.

[0437] Additional disorders that are likely to have an autoimmune component that may be treated, prevented, diagnosed and/or prognosed with the compositions of the invention include, but are not limited to, scleroderma with anti-collagen antibodies (often characterized, e.g., by nuclear and other nuclear antibodies), mixed connective tissue disease (often characterized, e.g., by antibodies to extractable nuclear antigens (e.g., ribonucleoprotein)), polymyositis (often characterized, e.g., by nonhistone ANA), pernicious anemia (often characterized, e.g., by antiparietal cell, microsomes, and intrinsic factor antibodies), idiopathic Addison's disease (often characterized, e.g., by humoral and cell-mediated adrenal cytotoxicity, infertility (often characterized, e.g., by antispermatozoal antibodies), glomerulonephritis (often characterized, e.g., by glomerular basement membrane antibodies or immune complexes), bullous pemphigoid (often characterized, e.g., by IgG and complement in basement membrane), Sjogren's syndrome (often characterized, e.g., by multiple tissue antibodies, and/or a specific nonhistone ANA (SS-B)), diabetes mellitus (often characterized, e.g., by cell-mediated and humoral islet cell antibodies), and adrenergic drug resistance (including adrenergic drug resistance with asthma or cystic fibrosis) (often characterized, e.g., by beta-adrenergic receptor antibodies).

[0438] Additional disorders that may have an autoimmune component that may be treated, prevented, diagnosed and/or prognosed with the compositions of the invention include, but are not limited to, chronic active hepatitis (often characterized, e.g., by smooth muscle antibodies), primary biliary cirrhosis (often characterized, e.g., by mitochondria antibodies), other endocrine gland failure (often characterized, e.g., by specific tissue antibodies in some cases), vitiligo (often characterized, e.g., by melanocyte antibodies), vasculitis (often characterized, e.g., by Ig and complement in vessel walls and/or low serum complement), post-MI (often characterized, e.g., by myocardial antibodies), cardiotomy syndrome (often characterized, e.g., by myocardial antibodies), urticaria (often characterized, e.g., by IgG and IgM antibodies to IgE), atopic dermatitis (often characterized, e.g., by IgG and IgM antibodies to IgE), asthma (often characterized, e.g., by IgG and IgM antibodies to IgE), and many other inflammatory, granulomatous, degenerative, and atrophic disorders.

[0439] In a preferred embodiment, the autoimmune diseases and disorders and/or conditions associated with the diseases and disorders recited above are treated, prevented, diagnosed and/or prognosed using for example, antagonists or agonists, polypeptides or polynucleotides, or antibodies of the present invention. In a specific preferred embodiment, rheumatoid arthritis is treated, prevented, and/or diagnosed using polynucleotides, polypeptides, antibodies, and/or agonists or antagonists of the present invention.

[0440] In another specific preferred embodiment, systemic lupus erythematosus is treated, prevented, and/or diagnosed using polynucleotides, polypeptides, antibodies, and/or agonists or antagonists of the present invention. In another specific preferred embodiment, idiopathic thrombocytopenia purpura is treated, prevented, and/or diagnosed using polynucleotides, polypeptides, antibodies, and/or agonists or antagonists of the present invention.

[0441] In another specific preferred embodiment IgA nephropathy is treated, prevented, and/or diagnosed using polynucleotides, polypeptides, antibodies, and/or agonists or antagonists of the present invention.

[0442] In a preferred embodiment, the autoimmune diseases and disorders and/or conditions associated with the diseases and disorders recited above are treated, prevented, diagnosed and/or prognosed using polynucleotides, polypeptides, antibodies, and/or agonists or antagonists of the present invention.

[0443] In preferred embodiments, polypeptides, antibodies, polynucleotides and/or agonists or antagonists of the present invention are used as a immunosuppressive agens).

[0444] Polynucleotides, polypeptides, antibodies, and/or agonists or antagonists of the present invention may be useful in treating, preventing, prognosing, and/or diagnosing diseases, disorders, and/or conditions of hematopoietic cells. Polynucleotides, polypeptides, antibodies, and/or agonists or antagonists of the present invention could be used to increase differentiation and proliferation of hematopoietic cells, including the pluripotent stem cells, in an effort to treat or prevent those diseases, disorders, and/or conditions associated with a decrease in certain (or many) types hematopoietic cells, including but not limited to, leukopenia, neutropenia, anemia, and thrombocytopenia. Alternatively, Polynucleotides, polypeptides, antibodies, and/or agonists or antagonists of the present invention could be used to increase differentiation and proliferation of hematopoietic cells, including the pluripotent stem cells, in an effort to treat or prevent those diseases, disorders, and/or conditions associated with an increase in certain (or many) types of hematopoietic cells, including but not limited to, histiocytosis.

[0445] Allergic reactions and conditions, such as asthma (particularly allergic asthma) or other respiratory problems, may also be treated, prevented, diagnosed and/or prognosed using polypeptides, antibodies, or polynucleotides of the invention, and/or agonists or antagonists thereof. Moreover, these molecules can be used to treat, prevent, prognose, and/or diagnose anaphylaxis, hypersensitivity to an antigenic molecule, or blood group incompatibility.

[0446] Additionally, polypeptides or polynucleotides of the invention, and/or agonists or antagonists thereof, may be used to treat, prevent, diagnose and/or prognose IgE-mediated allergic reactions. Such allergic reactions include, but are not limited to, asthma, rhinitis, and eczema. In specific embodiments, polynucleotides, polypeptides, antibodies, and/or agonists or antagonists of the present invention may be used to modulate IgE concentrations in vitro or in vivo.

[0447] Moreover, polynucleotides, polypeptides, antibodies, and/or agonists or antagonists of the present invention have uses in the diagnosis, prognosis, prevention, and/or treatment of inflammatory conditions. For example, since polypeptides, antibodies, or polynucleotides of the invention, and/or agonists or antagonists of the invention may inhibit the activation, proliferation and/or differentiation of cells involved in an inflammatory response, these molecules can be used to prevent and/or treat chronic and acute inflammatory conditions. Such inflammatory conditions include, but are not limited to, for example, inflammation associated with infection (e.g., septic shock, sepsis, or systemic inflammatory response syndrome), ischemia-reperfusion injury, endotoxin lethality, complement-mediated hyperacute rejection, nephritis, cytokine or chemokine induced lung injury, inflammatory bowel disease, Crohn's disease, over production of cytokines (e.g., TNF or IL-1.), respiratory disorders (e.g., asthma and allergy); gastrointestinal disorders (e.g., inflammatory bowel disease); cancers (e.g., gastric, ovarian, lung, bladder, liver, and breast); CNS disorders (e.g., multiple sclerosis; ischemic brain injury and/or stroke, traumatic brain injury, neurodegenerative disorders (e.g., Parkinson's disease and Alzheimer's disease); AIDS-related dementia; and prion disease); cardiovascular disorders (e.g., atherosclerosis, myocarditis, cardiovascular disease, and cardiopulmonary bypass complications); as well as many additional diseases, conditions, and disorders that are characterized by inflammation (e.g., hepatitis, rheumatoid arthritis, gout, trauma, pancreatitis, sarcoidosis, dermatitis, renal ischemia-reperfusion injury, Grave's disease, systemic lupus erythematosus, diabetes mellitus, and allogenic transplant rejection).

[0448] Because inflammation is a fundamental defense mechanism, inflammatory disorders can effect virtually any tissue of the body. Accordingly, polynucleotides, polypeptides, and antibodies of the invention, as well as agonists or antagonists thereof, have uses in the treatment of tissue-specific inflammatory disorders, including, but not limited to, adrenalitis, alveolitis, angiocholecystitis, appendicitis, balanitis, blepharitis, bronchitis, bursitis, carditis, cellulitis, cervicitis, cholecystitis, chorditis, cochlitis, colitis, conjunctivitis, cystitis, dermatitis, diverticulitis, encephalitis, endocarditis, esophagitis, eustachitis, fibrositis, folliculitis, gastritis, gastroenteritis, gingivitis, glossitis, hepatosplenitis, keratitis, labyrinthitis, laryngitis, lymphangitis, mastitis, media otitis, meningitis, metritis, mucitis, myocarditis, myosititis, myringitis, nephritis, neuritis, orchitis, osteochondritis, otitis, pericarditis, peritendonitis, peritonitis, pharyngitis, phlebitis, poliomyelitis, prostatitis, pulpitis, retinitis, rhinitis, salpingitis, scleritis, sclerochoroiditis, scrotitis, sinusitis, spondylitis, steatitis, stomatitis, synovitis, syringitis, tendonitis, tonsillitis, urethritis, and vaginitis.

[0449] In specific embodiments, polypeptides, antibodies, or polynucleotides of the invention, and/or agonists or antagonists thereof, are useful to diagnose, prognose, prevent, and/or treat organ transplant rejections and graft-versus-host disease. Organ rejection occurs by host immune cell destruction of the transplanted tissue through an immune response. Similarly, an immune response is also involved in GVHD, but, in this case, the foreign transplanted immune cells destroy the host tissues. Polypeptides, antibodies, or polynucleotides of the invention, and/or agonists or antagonists thereof, that inhibit an immune response, particularly the activation, proliferation, differentiation, or chemotaxis of T-cells, may be an effective therapy in preventing organ rejection or GVHD. In specific embodiments, polypeptides, antibodies, or polynucleotides of the invention, and/or agonists or antagonists thereof, that inhibit an immune response, particularly the activation, proliferation, differentiation, or chemotaxis of T-cells, may be an effective therapy in preventing experimental allergic and hyperacute xenograft rejection.

[0450] In other embodiments, polypeptides, antibodies, or polynucleotides of the invention, and/or agonists or antagonists thereof, are useful to diagnose, prognose, prevent, and/or treat immune complex diseases, including, but not limited to, serum sickness, post streptococcal glomerulonephritis, polyarteritis nodosa, and immune complex-induced vasculitis.

[0451] Polypeptides, antibodies, polynucleotides and/or agonists or antagonists of the invention can be used to treat, detect, and/or prevent infectious agents. For example, by increasing the immune response, particularly increasing the proliferation activation and/or differentiation of B and/or T cells, infectious diseases may be treated, detected, and/or prevented. The immune response may be increased by either enhancing an existing immune response, or by initiating a new immune response. Alternatively, polynucleotides, polypeptides, antibodies, and/or agonists or antagonists of the present invention may also directly inhibit the infectious agent (refer to section of application listing infectious agents, etc), without necessarily eliciting an immune response.

[0452] In another embodiment, polypeptides, antibodies, polynucleotides and/or agonists or antagonists of the present invention are used as a vaccine adjuvant that enhances immune responsiveness to an antigen. In a specific embodiment, polypeptides, antibodies, polynucleotides and/or agonists or antagonists of the present invention are used as an adjuvant to enhance tumor-specific immune responses.

[0453] In another specific embodiment, polypeptides, antibodies, polynucleotides and/or agonists or antagonists of the present invention are used as an adjuvant to enhance anti-viral immune responses. Anti-viral immune responses that may be enhanced using the compositions of the invention as an adjuvant, include virus and virus associated diseases or symptoms described herein or otherwise known in the art. In specific embodiments, the compositions of the invention are used as an adjuvant to enhance an immune response to a virus, disease, or symptom selected from the group consisting of: AIDS, meningitis, Dengue, EBV, and hepatitis (e.g., hepatitis B). In another specific embodiment, the compositions of the invention are used as an adjuvant to enhance an immune response to a virus, disease, or symptom selected from the group consisting of: HIV/AIDS, respiratory syncytial virus, Dengue, rotavirus, Japanese B encephalitis, influenza A and B, parainfluenza, measles, cytomegalovirus, rabies, Junin, Chikungunya, Rift Valley Fever, herpes simplex, and yellow fever.

[0454] In another specific embodiment, polypeptides, antibodies, polynucleotides and/or agonists or antagonists of the present invention are used as an adjuvant to enhance anti-bacterial or anti-fungal immune responses. Anti-bacterial or anti-fungal immune responses that may be enhanced using the compositions of the invention as an adjuvant, include bacteria or fungus and bacteria or fungus associated diseases or symptoms described herein or otherwise known in the art. In specific embodiments, the compositions of the invention are used as an adjuvant to enhance an immune response to a bacteria or fungus, disease, or symptom selected from the group consisting of: tetanus, Diphtheria, botulism, and meningitis type B.

[0455] In another specific embodiment, the compositions of the invention are used as an adjuvant to enhance an immune response to a bacteria or fungus, disease, or symptom selected from the group consisting of: Vibrio cholerae, Mycobacterium leprae, Salmonella typhi, Salmonella paratyphi, Meisseria meningitidis, Streptococcus pneumoniae, Group B streptococcus, Shigella spp., Enterotoxigenic Escherichia coli, Enterohemorrhagic E. coli, and Borrelia burgdorferi.

[0456] In another specific embodiment, polypeptides, antibodies, polynucleotides and/or agonists or antagonists of the present invention are used as an adjuvant to enhance anti-parasitic immune responses. Anti-parasitic immune responses that may be enhanced using the compositions of the invention as an adjuvant, include parasite and parasite associated diseases or symptoms described herein or otherwise known in the art. In specific embodiments, the compositions of the invention are used as an adjuvant to enhance an immune response to a parasite. In another specific embodiment, the compositions of the invention are used as an adjuvant to enhance an immune response to Plasmodium (malaria) or Leishmania.

[0457] In another specific embodiment, polypeptides, antibodies, polynucleotides and/or agonists or antagonists of the present invention may also be employed to treat infectious diseases including silicosis, sarcoidosis, and idiopathic pulmonary fibrosis; for example, by preventing the recruitment and activation of mononuclear phagocytes.

[0458] In another specific embodiment, polypeptides, antibodies, polynucleotides and/or agonists or antagonists of the present invention are used as an antigen for the generation of antibodies to inhibit or enhance immune mediated responses against polypeptides of the invention.

[0459] In one embodiment, polypeptides, antibodies, polynucleotides and/or agonists or antagonists of the present invention are administered to an animal (e.g., mouse, rat, rabbit, hamster, guinea pig, pigs, micro-pig, chicken, camel, goat, horse, cow, sheep, dog, cat, non-human primate, and human, most preferably human) to boost the immune system to produce increased quantities of one or more antibodies (e.g., IgG, IgA, IgM, and IgE), to induce higher affinity antibody production and immunoglobulin class switching (e.g., IgG, IgA, IgM, and IgE), and/or to increase an immune response.

[0460] In another specific embodiment, polypeptides, antibodies, polynucleotides and/or agonists or antagonists of the present invention are used as a stimulator of B cell responsiveness to pathogens.

[0461] In another specific embodiment, polypeptides, antibodies, polynucleotides and/or agonists or antagonists of the present invention are used as an activator of T cells.

[0462] In another specific embodiment, polypeptides, antibodies, polynucleotides and/or agonists or antagonists of the present invention are used as an agent that elevates the immune status of an individual prior to their receipt of immunosuppressive therapies.

[0463] In another specific embodiment, polypeptides, antibodies, polynucleotides and/or agonists or antagonists of the present invention are used as an agent to induce higher affinity antibodies.

[0464] In another specific embodiment, polypeptides, antibodies, polynucleotides and/or agonists or antagonists of the present invention are used as an agent to increase serum immunoglobulin concentrations.

[0465] In another specific embodiment, polypeptides, antibodies, polynucleotides and/or agonists or antagonists of the present invention are used as an agent to accelerate recovery of immunocompromised individuals.

[0466] In another specific embodiment, polypeptides, antibodies, polynucleotides and/or agonists or antagonists of the present invention are used as an agent to boost immunoresponsiveness among aged populations and/or neonates.

[0467] In another specific embodiment, polypeptides, antibodies, polynucleotides and/or agonists or antagonists of the present invention are used as an immune system enhancer prior to, during, or after bone marrow transplant and/or other transplants (e.g., allogeneic or xenogeneic organ transplantation). With respect to transplantation, compositions of the invention may be administered prior to, concomitant with, and/or after transplantation. In a specific embodiment, compositions of the invention are administered after transplantation, prior to the beginning of recovery of T-cell populations. In another specific embodiment, compositions of the invention are first administered after transplantation after the beginning of recovery of T cell populations, but prior to full recovery of B cell populations.

[0468] In another specific embodiment, polypeptides, antibodies, polynucleotides and/or agonists or antagonists of the present invention are used as an agent to boost immunoresponsiveness among individuals having an acquired loss of B cell function. Conditions resulting in an acquired loss of B cell function that may be ameliorated or treated by administering the polypeptides, antibodies, polynucleotides and/or agonists or antagonists thereof, include, but are not limited to, HIV Infection, AIDS, bone marrow transplant, and B cell chronic lymphocytic leukemia (CLL).

[0469] In another specific embodiment, polypeptides, antibodies, polynucleotides and/or agonists or antagonists of the present invention are used as an agent to boost immunoresponsiveness among individuals having a temporary immune deficiency. Conditions resulting in a temporary immune deficiency that may be ameliorated or treated by administering the polypeptides, antibodies, polynucleotides and/or agonists or antagonists thereof, include, but are not limited to, recovery from viral infections (e.g., influenza), conditions associated with malnutrition, recovery from infectious mononucleosis, or conditions associated with stress, recovery from measles, recovery from blood transfusion, and recovery from surgery.

[0470] In another specific embodiment, polypeptides, antibodies, polynucleotides and/or agonists or antagonists of the present invention are used as a regulator of antigen presentation by monocytes, dendritic cells, and/or B-cells. In one embodiment, polynucleotides, polypeptides, antibodies, and/or agonists or antagonists of the present invention enhance antigen presentation or antagonizes antigen presentation in vitro or in vivo. Moreover, in related embodiments, said enhancement or antagonism of antigen presentation may be useful as an anti-tumor treatment or to modulate the immune system.

[0471] In another specific embodiment, polypeptides, antibodies, polynucleotides and/or agonists or antagonists of the present invention are used as an agent to direct an individual's immune system towards development of a humoral response (i.e. TH2) as opposed to a TH1 cellular response.

[0472] In another specific embodiment, polypeptides, antibodies, polynucleotides and/or agonists or antagonists of the present invention are used as a means to induce tumor proliferation and thus make it more susceptible to anti-neoplastic agents. For example, multiple myeloma is a slowly dividing disease and is thus refractory to virtually all anti-neoplastic regimens. If these cells were forced to proliferate more rapidly their susceptibility profile would likely change.

[0473] In another specific embodiment, polypeptides, antibodies, polynucleotides and/or agonists or antagonists of the present invention are used as a stimulator of B cell production in pathologies such as AIDS, chronic lymphocyte disorder and/or Common Variable Immunodificiency.

[0474] In another specific embodiment, polypeptides, antibodies, polynucleotides and/or agonists or antagonists of the present invention are used as a therapy for generation and/or regeneration of lymphoid tissues following surgery, trauma or genetic defect. In another specific embodiment, polypeptides, antibodies, polynucleotides and/or agonists or antagonists of the present invention are used in the pretreatment of bone marrow samples prior to transplant.

[0475] In another specific embodiment, polypeptides, antibodies, polynucleotides and/or agonists or antagonists of the present invention are used as a gene-based therapy for genetically inherited disorders resulting in immuno-incompetence/immunodeficiency such as observed among SCID patients.

[0476] In another specific embodiment, polypeptides, antibodies, polynucleotides and/or agonists or antagonists of the present invention are used as a means of activating monocytes/macrophages to defend against parasitic diseases that effect monocytes such as Leishmania.

[0477] In another specific embodiment, polypeptides, antibodies, polynucleotides and/or agonists or antagonists of the present invention are used as a means of regulating secreted cytokines that are elicited by polypeptides of the invention.

[0478] In another embodiment, polypeptides, antibodies, polynucleotides and/or agonists or antagonists of the present invention are used in one or more of the applications decribed herein, as they may apply to veterinary medicine.

[0479] In another specific embodiment, polypeptides, antibodies, polynucleotides and/or agonists or antagonists of the present invention are used as a means of blocking various aspects of immune responses to foreign agents or self. Examples of diseases or conditions in which blocking of certain aspects of immune responses may be desired include autoimmune disorders such as lupus, and arthritis, as well as immunoresponsiveness to skin allergies, inflammation, bowel disease, injury and diseases/disorders associated with pathogens.

[0480] In another specific embodiment, polypeptides, antibodies, polynucleotides and/or agonists or antagonists of the present invention are used as a therapy for preventing the B cell proliferation and Ig secretion associated with autoimmune diseases such as idiopathic thrombocytopenic purpura, systemic lupus erythematosus and multiple sclerosis.

[0481] In another specific embodiment, polypeptides, antibodies, polynucleotides and/or agonists or antagonists of the present invention are used as a inhibitor of B and/or T cell migration in endothelial cells. This activity disrupts tissue architecture or cognate responses and is useful, for example in disrupting immune responses, and blocking sepsis.

[0482] In another specific embodiment, polypeptides, antibodies, polynucleotides and/or agonists or antagonists of the present invention are used as a therapy for chronic hypergammaglobulinemia evident in such diseases as monoclonal gammopathy of undetermined significance (MGUS), Waldenstrom's disease, related idiopathic monoclonal gammopathies, and plasmacytomas.

[0483] In another specific embodiment, polypeptides, antibodies, polynucleotides and/or agonists or antagonists of the present invention may be employed for instance to inhibit polypeptide chemotaxis and activation of macrophages and their precursors, and of neutrophils, basophils, B lymphocytes and some T-cell subsets, e.g., activated and CD8 cytotoxic T cells and natural killer cells, in certain autoimmune and chronic inflammatory and infective diseases. Examples of autoimmune diseases are described herein and include multiple sclerosis, and insulin-dependent diabetes.

[0484] The polypeptides, antibodies, polynucleotides and/or agonists or antagonists of the present invention may also be employed to treat idiopathic hyper-eosinophilic syndrome by, for example, preventing eosinophil production and migration.

[0485] In another specific embodiment, polypeptides, antibodies, polynucleotides and/or agonists or antagonists of the present invention are used to enhance or inhibit complement mediated cell lysis.

[0486] In another specific embodiment, polypeptides, antibodies, polynucleotides and/or agonists or antagonists of the present invention are used to enhance or inhibit antibody dependent cellular cytotoxicity.

[0487] In another specific embodiment, polypeptides, antibodies, polynucleotides and/or agonists or antagonists of the present invention may also be employed for treating atherosclerosis, for example, by preventing monocyte infiltration in the artery wall.

[0488] In another specific embodiment, polypeptides, antibodies, polynucleotides and/or agonists or antagonists of the present invention may be employed to treat adult respiratory distress syndrome (ARDS).

[0489] In another specific embodiment, polypeptides, antibodies, polynucleotides and/or agonists or antagonists of the present invention may be useful for stimulating wound and tissue repair, stimulating angiogenesis, and/or stimulating the repair of vascular or lymphatic diseases or disorders. Additionally, agonists and antagonists of the invention may be used to stimulate the regeneration of mucosal surfaces.

[0490] In a specific embodiment, polynucleotides or polypeptides, and/or agonists thereof are used to diagnose, prognose, treat, and/or prevent a disorder characterized by primary or acquired immunodeficiency, deficient serum immunoglobulin production, recurrent infections, and/or immune system dysfunction. Moreover, polynucleotides or polypeptides, and/or agonists thereof may be used to treat or prevent infections of the joints, bones, skin, and/or parotid glands, blood-borne infections (e.g., sepsis, meningitis, septic arthritis, and/or osteomyelitis), autoimmune diseases (e.g., those disclosed herein), inflammatory disorders, and malignancies, and/or any disease or disorder or condition associated with these infections, diseases, disorders and/or malignancies) including, but not limited to, CVID, other primary immune deficiencies, HIV disease, CLL, recurrent bronchitis, sinusitis, otitis media, conjunctivitis, pneumonia, hepatitis, meningitis, herpes zoster (e.g., severe herpes zoster), and/or pneumocystis carnii. Other diseases and disorders that may be prevented, diagnosed, prognosed, and/or treated with polynucleotides or polypeptides, and/or agonists of the present invention include, but are not limited to, HIV infection, HTLV-BLV infection, lymphopenia, phagocyte bactericidal dysfunction anemia, thrombocytopenia, and hemoglobinuria.

[0491] In another embodiment, polynucleotides, polypeptides, antibodies, and/or agonists or antagonists of the present invention are used to treat, and/or diagnose an individual having common variable immunodeficiency disease (“CVID”; also known as “acquired agammaglobulinemia” and “acquired hypogammaglobulinemia”) or a subset of this disease.

[0492] In a specific embodiment, polynucleotides, polypeptides, antibodies, and/or agonists or antagonists of the present invention may be used to diagnose, prognose, prevent, and/or treat cancers or neoplasms including immune cell or immune tissue-related cancers or neoplasms. Examples of cancers or neoplasms that may be prevented, diagnosed, or treated by polynucleotides, polypeptides, antibodies, and/or agonists or antagonists of the present invention include, but are not limited to, acute myelogenous leukemia, chronic myelogenous leukemia, Hodgkin's disease, non-Hodgkin's lymphoma, acute lymphocytic anemia (ALL) Chronic lymphocyte leukemia, plasmacytomas, multiple myeloma, Burkitt's lymphoma, EBV-transformed diseases, and/or diseases and disorders described in the section entitled “Hyperproliferative Disorders” elsewhere herein.

[0493] In another specific embodiment, polypeptides, antibodies, polynucleotides and/or agonists or antagonists of the present invention are used as a therapy for decreasing cellular proliferation of Large B-cell Lymphomas.

[0494] In another specific embodiment, polypeptides, antibodies, polynucleotides and/or agonists or antagonists of the present invention are used as a means of decreasing the involvement of B cells and Ig associated with Chronic Myelogenous Leukemia.

[0495] In specific embodiments, the compositions of the invention are used as an agent to boost immunoresponsiveness among B cell immunodeficient individuals, such as, for example, an individual who has undergone a partial or complete splenectomy.

[0496] Antagonists of the invention include, for example, binding and/or inhibitory antibodies, antisense nucleic acids, ribozymes or soluble forms of the polypeptides of the present invention (e.g., Fc fusion protein; see, e.g., Example 9). Agonists of the invention include, for example, binding or stimulatory antibodies, and soluble forms of the polypeptides (e.g., Fc fusion proteins; see, e.g., Example 9). Polypeptides, antibodies, polynucleotides and/or agonists or antagonists of the present invention may be employed in a composition with a pharmaceutically acceptable carrier, e.g., as described herein.

[0497] In another embodiment, polypeptides, antibodies, polynucleotides and/or agonists or antagonists of the present invention are administered to an animal (including, but not limited to, those listed above, and also including transgenic animals) incapable of producing functional endogenous antibody molecules or having an otherwise compromised endogenous immune system, but which is capable of producing human immunoglobulin molecules by means of a reconstituted or partially reconstituted immune system from another animal (see, e.g., published PCT Application Nos. WO98/24893, WO/9634096, WO/9633735, and WO/9110741). Administration of polypeptides, antibodies, polynucleotides and/or agonists or antagonists of the present invention to such animals is useful for the generation of monoclonal antibodies against the polypeptides, antibodies, polynucleotides and/or agonists or antagonists of the present invention.

[0498] Blood-related Disorders

[0499] The polynucleotides, polypeptides, antibodies, and/or agonists or antagonists of the present invention may be used to modulate hemostatic (the stopping of bleeding) or thrombolytic (clot dissolving) activity. For example, by increasing hemostatic or thrombolytic activity, polynucleotides or polypeptides, and/or agonists or antagonists of the present invention could be used to treat or prevent blood coagulation diseases, disorders, and/or conditions (e.g., afibrinogenemia, factor deficiencies, hemophilia), blood platelet diseases, disorders, and/or conditions (e.g., thrombocytopenia), or wounds resulting from trauma, surgery, or other causes. Alternatively, polynucleotides, polypeptides, antibodies, and/or agonists or antagonists of the present invention that can decrease hemostatic or thrombolytic activity could be used to inhibit or dissolve clotting. These molecules could be important in the treatment or prevention of heart attacks (infarction), strokes, or scarring.

[0500] In specific embodiments, the polynucleotides, polypeptides, antibodies, and/or agonists or antagonists of the present invention may be used to prevent, diagnose, prognose, and/or treat thrombosis, arterial thrombosis, venous thrombosis, thromboembolism, pulmonary embolism, atherosclerosis, myocardial infarction, transient ischemic attack, unstable angina. In specific embodiments, the polynucleotides, polypeptides, antibodies, and/or agonists or antagonists of the present invention may be used for the prevention of occulsion of saphenous grafts, for reducing the risk of periprocedural thrombosis as might accompany angioplasty procedures, for reducing the risk of stroke in patients with atrial fibrillation including nonrheumatic atrial fibrillation, for reducing the risk of embolism associated with mechanical heart valves and or mitral valves disease. Other uses for the polynucleotides, polypeptides, antibodies, and/or agonists or antagonists of the present invention, include, but are not limited to, the prevention of occlusions in extrcorporeal devices (e.g., intravascular canulas, vascular access shunts in hemodialysis patients, hemodialysis machines, and cardiopulmonary bypass machines).

[0501] The polynucleotides, polypeptides, antibodies, and/or agonists or antagonists of the present invention may be used to modulate hematopoietic activity (the formation of blood cells). For example, the polynucleotides, polypeptides, antibodies, and/or agonists or antagonists of the present invention may be used to increase the quantity of all or subsets of blood cells, such as, for example, erythrocytes, lymphocytes (B or T cells), myeloid cells (e.g., basophils, eosinophils, neutrophils, mast cells, macrophages) and platelets. The ability to decrease the quantity of blood cells or subsets of blood cells may be useful in the prevention, detection, diagnosis and/or treatment of anemias and leukopenias described below. Alternatively, the polynucleotides, polypeptides, antibodies, and/or agonists or antagonists of the present invention may be used to decrease the quantity of all or subsets of blood cells, such as, for example, erythrocytes, lymphocytes (B or T cells), myeloid cells (e.g., basophils, eosinophils, neutrophils, mast cells, macrophages) and platelets. The ability to decrease the quantity of blood cells or subsets of blood cells may be useful in the prevention, detection, diagnosis and/or treatment of leukocytoses, such as, for example eosinophilia.

[0502] The polynucleotides, polypeptides, antibodies, and/or agonists or antagonists of the present invention may be used to prevent, treat, or diagnose blood dyscrasia.

[0503] Anemias are conditions in which the number of red blood cells or amount of hemoglobin (the protein that carries oxygen) in them is below normal. Anemia may be caused by excessive bleeding, decreased red blood cell production, or increased red blood cell destruction (hemolysis). The polynucleotides, polypeptides, antibodies, and/or agonists or antagonists of the present invention may be useful in treating, preventing, and/or diagnosing anemias. Anemias that may be treated prevented or diagnosed by the polynucleotides, polypeptides, antibodies, and/or agonists or antagonists of the present invention include iron deficiency anemia, hypochromic anemia, microcytic anemia, chlorosis, hereditary siderob;astic anemia, idiopathic acquired sideroblastic anemia, red cell aplasia, megaloblastic anemia (e.g., pernicious anemia, (vitamin B12 deficiency) and folic acid deficiency anemia), aplastic anemia, hemolytic anemias (e.g., autoimmune helolytic anemia, microangiopathic hemolytic anemia, and paroxysmal nocturnal hemoglobinuria). The polynucleotides, polypeptides, antibodies, and/or agonists or antagonists of the present invention may be useful in treating, preventing, and/or diagnosing anemias associated with diseases including but not limited to, anemias associated with systemic lupus erythematosus, cancers, lymphomas, chronic renal disease, and enlarged spleens. The polynucleotides, polypeptides, antibodies, and/or agonists or antagonists of the present invention may be useful in treating, preventing, and/or diagnosing anemias arising from drug treatments such as anemias associated with methyldopa, dapsone, and/or sulfadrugs. Additionally, rhe polynucleotides, polypeptides, antibodies, and/or agonists or antagonists of the present invention may be useful in treating, preventing, and/or diagnosing anemias associated with abnormal red blood cell architecture including but not limited to, hereditary spherocytosis, hereditary elliptocytosis, glucose-6-phosphate dehydrogenase deficiency, and sickle cell anemia.

[0504] The polynucleotides, polypeptides, antibodies, and/or agonists or antagonists of the present invention may be useful in treating, preventing, and/or diagnosing hemoglobin abnormalities, (e.g., those associated with sickle cell anemia, hemoglobin C disease, hemoglobin S-C disease, and hemoglobin E disease). Additionally, the polynucleotides, polypeptides, antibodies, and/or agonists or antagonists of the present invention may be useful in diagnosing, prognosing, preventing, and/or treating thalassemias, including, but not limited to major and minor forms of alpha-thalassemia and beta-thalassemia.

[0505] In another embodiment, the polynucleotides, polypeptides, antibodies, and/or agonists or antagonists of the present invention may be useful in diagnosing, prognosing, preventing, and/or treating bleeding disorders including, but not limited to, thrombocytopenia (e.g., idiopathic thrombocytopenic purpura, and thrombotic thrombocytopenic purpura), Von Willebrand's disease, hereditary platelet disorders (e.g., storage pool disease such as Chediak-Higashi and Hermansky-Pudlak syndromes, thromboxane A2 dysfunction, thromboasthenia, and Bernard-Soulier syndrome), hemolytic-uremic syndrome, hemophelias such as hemophelia A or Factor VII deficiency and Christmas disease or Factor IX deficiency, Hereditary Hemorhhagic Telangiectsia, also known as Rendu-Osler-Weber syndrome, allergic purpura (Henoch Schonlein purpura) and disseminated intravascular coagulation.

[0506] The effect of the polynucleotides, polypeptides, antibodies, and/or agonists or antagonists of the present invention on the clotting time of blood may be monitored using any of the clotting tests known in the art including, but not limited to, whole blood partial thromboplastin time (PTT), the activated partial thromboplastin time (aPTT), the activated clotting time (ACT), the recalcified activated clotting time, or the Lee-White Clotting time.

[0507] Several diseases and a variety of drugs can cause platelet dysfunction. Thus, in a specific embodiment, the polynucleotides, polypeptides, antibodies, and/or agonists or antagonists of the present invention may be useful in diagnosing, prognosing, preventing, and/or treating acquired platelet dysfunction such as platelet dysfunction accompanying kidney failure, leukemia, multiple myeloma, cirrhosis of the liver, and systemic lupus erythematosus as well as platelet dysfunction associated with drug treatments, including treatment with aspirin, ticlopidine, nonsteroidal anti-inflammatory drugs (used for arthritis, pain, and sprains), and penicillin in high doses.

[0508] In another embodiment, the polynucleotides, polypeptides, antibodies, and/or agonists or antagonists of the present invention may be useful in diagnosing, prognosing, preventing, and/or treating diseases and disorders characterized by or associated with increased or decreased numbers of white blood cells. Leukopenia occurs when the number of white blood cells decreases below normal. Leukopenias include, but are not limited to, neutropenia and lymphocytopenia. An increase in the number of white blood cells compared to normal is known as leukocytosis. The body generates increased numbers of white blood cells during infection. Thus, leukocytosis may simply be a normal physiological parameter that reflects infection. Alternatively, leukocytosis may be an indicator of injury or other disease such as cancer. Leokocytoses, include but are not limited to, eosinophilia, and accumulations of macrophages. In specific embodiments, the polynucleotides, polypeptides, antibodies, and/or agonists or antagonists of the present invention may be useful in diagnosing, prognosing, preventing, and/or treating leukopenia. In other specific embodiments, the polynucleotides, polypeptides, antibodies, and/or agonists or antagonists of the present invention may be useful in diagnosing, prognosing, preventing, and/or treating leukocytosis.

[0509] Leukopenia may be a generalized decreased in all types of white blood cells, or may be a specific depletion of particular types of white blood cells. Thus, in specific embodiments, the polynucleotides, polypeptides, antibodies, and/or agonists or antagonists of the present invention may be useful in diagnosing, prognosing, preventing, and/or treating decreases in neutrophil numbers, known as neutropenia. Neutropenias that may be diagnosed, prognosed, prevented, and/or treated by the polynucleotides, polypeptides, antibodies, and/or agonists or antagonists of the present invention include, but are not limited to, infantile genetic agranulocytosis, familial neutropenia, cyclic neutropenia, neutropenias resulting from or associated with dietary deficiencies (e.g., vitamin B 12 deficiency or folic acid deficiency), neutropenias resulting from or associated with drug treatments (e.g., antibiotic regimens such as penicillin treatment, sulfonamide treatment, anticoagulant treatment, anticonvulsant drugs, anti-thyroid drugs, and cancer chemotherapy), and neutropenias resulting from increased neutrophil destruction that may occur in association with some bacterial or viral infections, allergic disorders, autoimmune diseases, conditions in which an individual has an enlarged spleen (e.g., Felty syndrome, malaria and sarcoidosis), and some drug treatment regimens.

[0510] The polynucleotides, polypeptides, antibodies, and/or agonists or antagonists of the present invention may be useful in diagnosing, prognosing, preventing, and/or treating lymphocytopenias (decreased numbers of B and/or T lymphocytes), including, but not limited lymphocytopenias resulting from or associated with stress, drug treatments (e.g., drug treatment with corticosteroids, cancer chemotherapies, and/or radiation therapies), AIDS infection and/or other diseases such as, for example, cancer, rheumatoid arthritis, systemic lupus erythematosus, chronic infections, some viral infections and/or hereditary disorders (e.g., DiGeorge syndrome, Wiskott-Aldrich Syndome, severe combined immunodeficiency, ataxia telangiectsia).

[0511] The polynucleotides, polypeptides, antibodies, and/or agonists or antagonists of the present invention may be useful in diagnosing, prognosing, preventing, and/or treating diseases and disorders associated with macrophage numbers and/or macrophage function including, but not limited to, Gaucher's disease, Niemann-Pick disease, Letterer-Siwe disease and Hand-Schuller-Christian disease.

[0512] In another embodiment, the polynucleotides, polypeptides, antibodies, and/or agonists or antagonists of the present invention may be useful in diagnosing, prognosing, preventing, and/or treating diseases and disorders associated with eosinophil numbers and/or eosinophil function including, but not limited to, idiopathic hypereosinophilic syndrome, eosinophilia-myalgia syndrome, and Hand-Schuller-Christian disease.

[0513] In yet another embodiment, the polynucleotides, polypeptides, antibodies, and/or agonists or antagonists of the present invention may be useful in diagnosing, prognosing, preventing, and/or treating leukemias and lymphomas including, but not limited to, acute lymphocytic (lymphpblastic) leukemia (ALL), acute myeloid (myelocytic, myelogenous, myeloblastic, or myelomonocytic) leukemia, chronic lymphocytic leukemia (e.g., B cell leukemias, T cell leukemias, Sezary syndrome, and Hairy cell leukenia), chronic myelocytic (myeloid, myelogenous, or granulocytic) leukemia, Hodgkin's lymphoma, non-hodgkin's lymphoma, Burkitt's lymphoma, and mycosis fungoides.

[0514] In other embodiments, the polynucleotides, polypeptides, antibodies, and/or agonists or antagonists of the present invention may be useful in diagnosing, prognosing, preventing, and/or treating diseases and disorders of plasma cells including, but not limited to, plasma cell dyscrasias, monoclonal gammaopathies, monoclonal gammopathies of undetermined significance, multiple myeloma, macroglobulinemia, Waldenstrom's macroglobulinemia, cryoglobulinemia, and Raynaud's phenomenon.

[0515] In other embodiments, the polynucleotides, polypeptides, antibodies, and/or agonists or antagonists of the present invention may be useful in treating, preventing, and/or diagnosing myeloproliferative disorders, including but not limited to, polycythemia vera, relative polycythemia, secondary polycythemia, myelofibrosis, acute myelofibrosis, agnogenic myelod metaplasia, thrombocythemia, (including both primary and seconday thrombocythemia) and chronic myelocytic leukemia.

[0516] In other embodiments, the polynucleotides, polypeptides, antibodies, and/or agonists or antagonists of the present invention may be useful as a treatment prior to surgery, to increase blood cell production.

[0517] In other embodiments, the polynucleotides, polypeptides, antibodies, and/or agonists or antagonists of the present invention may be useful as an agent to enhance the migration, phagocytosis, superoxide production, antibody dependent cellular cytotoxicity of neutrophils, eosionophils and macrophages.

[0518] In other embodiments, the polynucleotides, polypeptides, antibodies, and/or agonists or antagonists of the present invention may be useful as an agent to increase the number of stem cells in circulation prior to stem cells pheresis. In another specific embodiment, the polynucleotides, polypeptides, antibodies, and/or agonists or antagonists of the present invention may be useful as an agent to increase the number of stem cells in circulation prior to platelet pheresis.

[0519] In other embodiments, the polynucleotides, polypeptides, antibodies, and/or agonists or antagonists of the present invention may be useful as an agent to increase cytokine production.

[0520] In other embodiments, the polynucleotides, polypeptides, antibodies, and/or agonists or antagonists of the present invention may be useful in preventing, diagnosing, and/or treating primary hematopoietic disorders.

[0521] Hyperproliferative Disorders

[0522] Lung cancer associated polynucleotides or polypeptides, or agonists or antagonists thereof, can be used to treat, prevent, diagnose and/or prognose hyperproliferative diseases, disorders, and/or conditions, including neoplasms.

[0523] In a specific embodiment, lung cancer associated polynucleotides or polypeptides, or agonists or antagonists thereof, can be used to treat, prevent, and/or diagnose hyperproliferative diseases, disorders, and/or conditions of the lung.

[0524] In a preferred embodiment, lung cancer associated polynucleotides or polypeptides, or agonists or antagonists thereof, can be used to treat, prevent, and/or diagnose lung neoplasms.

[0525] Lung cancer associated polynucleotides or polypeptides, or agonists or antagonists of the invention, may inhibit the proliferation of the disorder through direct or indirect interactions. Alternatively, lung cancer associated polynucleotides or polypeptides, or agonists or antagonists thereof, may proliferate other cells, which can inhibit the hyperproliferative disorder.

[0526] For example, by increasing an immune response, particularly increasing antigenic qualities of the hyperproliferative disorder or by proliferating, differentiating, or mobilizing T-cells, hyperproliferative diseases, disorders, and/or conditions can be treated, prevented, and/or diagnosed. This immune response may be increased by either enhancing an existing immune response, or by initiating a new immune response. Alternatively, decreasing an immune response may also be a method of treating, preventing, and/or diagnosing hyperproliferative diseases, disorders, and/or conditions, such as a chemotherapeutic agent.

[0527] Examples of hyperproliferative diseases, disorders, and/or conditions that can be treated, prevented, and/or diagnosed by lung cancer associated polynucleotides or polypeptides, or agonists or antagonists thereof, include, but are not limited to neoplasms located in the: prostate, colon, abdomen, bone, breast, digestive system, liver, pancreas, peritoneum, endocrine glands (adrenal, parathyroid, pituitary, testicles, ovary, thymus, thyroid), eye, head and neck, nervous (central and peripheral), lymphatic system, pelvic, skin, soft tissue, spleen, thoracic, and urogenital.

[0528] Similarly, other hyperproliferative disorders can also be treated or detected by polynucleotides or polypeptides, or agonists or antagonists of the present invention. Examples of such hyperproliferative disorders include, but are not limited to: Acute Childhood Lymphoblastic Leukemia, Acute Lymphoblastic Leukemia, Acute Lymphocytic Leukemia, Acute Myeloid Leukemia, Adrenocortical Carcinoma, Adult (Primary) Hepatocellular Cancer, Adult (Primary) Liver Cancer, Adult Acute Lymphocytic Leukemia, Adult Acute Myeloid Leukemia, Adult Hodgkin's Disease, Adult Hodgkin's Lymphoma, Adult Lymphocytic Leukemia, Adult Non-Hodgkin's Lymphoma, Adult Primary Liver Cancer, Adult Soft Tissue Sarcoma, AIDS-Related Lymphoma, AIDS-Related Malignancies, Anal Cancer, Astrocytoma, Bile Duct Cancer, Bladder Cancer, Bone Cancer, Brain Stem Glioma, Brain Tumors, Breast Cancer, Cancer of the Renal Pelvis and Ureter, Central Nervous System (Primary) Lymphoma, Central Nervous System Lymphoma, Cerebellar Astrocytoma, Cerebral Astrocytoma, Cervical Cancer, Childhood (Primary) Hepatocellular Cancer, Childhood (Primary) Liver Cancer, Childhood Acute Lymphoblastic Leukemia, Childhood Acute Myeloid Leukemia, Childhood Brain Stem Glioma, Childhood Cerebellar Astrocytoma, Childhood Cerebral Astrocytoma, Childhood Extracranial Germ Cell Tumors, Childhood Hodgkin's Disease, Childhood Hodgkin's Lymphoma, Childhood Hypothalamic and Visual Pathway Glioma, Childhood Lymphoblastic Leukemia, Childhood Medulloblastoma, Childhood Non-Hodgkin's Lymphoma, Childhood Pineal and Supratentorial Primitive Neuroectodermal Tumors, Childhood Primary Liver Cancer, Childhood Rhabdomyosarcoma, Childhood Soft Tissue Sarcoma, Childhood Visual Pathway and Hypothalamic Glioma, Chronic Lymphocytic Leukemia, Chronic Myelogenous Leukemia, Colon Cancer, Cutaneous T-Cell Lymphoma, Endocrine Pancreas Islet Cell Carcinoma, Endometrial Cancer, Ependymoma, Epithelial Cancer, Esophageal Cancer, Ewing's Sarcoma and Related Tumors, Exocrine Pancreatic Cancer, Extracranial Germ Cell Tumor, Extragonadal Germ Cell Tumor, Extrahepatic Bile Duct Cancer, Eye Cancer, Female Breast Cancer, Gaucher's Disease, Gallbladder Cancer, Gastric Cancer, Gastrointestinal Carcinoid Tumor, Gastrointestinal Tumors, Germ Cell Tumors, Gestational Trophoblastic Tumor, Hairy Cell Leukemia, Head and Neck Cancer, Hepatocellular Cancer, Hodgkin's Disease, Hodgkin's Lymphoma, Hypergammaglobulinemia, Hypopharyngeal Cancer, Intestinal Cancers, Intraocular Melanoma, Islet Cell Carcinoma, Islet Cell Pancreatic Cancer, Kaposi's Sarcoma, Kidney Cancer, Laryngeal Cancer, Lip and Oral Cavity Cancer, Liver Cancer, Lung Cancer, Lymphoproliferative Disorders, Macroglobulinemia, Male Breast Cancer, Malignant Mesothelioma, Malignant Thymoma, Medulloblastoma, Melanoma, Mesothelioma, Metastatic Occult Primary Squamous Neck Cancer, Metastatic Primary Squamous Neck Cancer, Metastatic Squamous Neck Cancer, Multiple Myeloma, Multiple Myeloma/Plasma Cell Neoplasm, Myelodysplastic Syndrome, Myelogenous Leukemia, Myeloid Leukemia, Myeloproliferative Disorders, Nasal Cavity and Paranasal Sinus Cancer, Nasopharyngeal Cancer, Neuroblastoma, Non-Hodgkin's Lymphoma During Pregnancy, Nonmelanoma Skin Cancer, Non-Small Cell Lung Cancer, Occult Primary Metastatic Squamous Neck Cancer, Oropharyngeal Cancer, Osteo-/Malignant Fibrous Sarcoma, Osteosarcoma/Malignant Fibrous Histiocytoma, Osteosarcoma/Malignant Fibrous Histiocytoma of Bone, Ovarian Epithelial Cancer, Ovarian Germ Cell Tumor, Ovarian Low Malignant Potential Tumor, Pancreatic Cancer, Paraproteinemias, Purpura, Parathyroid Cancer, Penile Cancer, Pheochromocytoma, Pituitary Tumor, Plasma Cell Neoplasm/Multiple Myeloma, Primary Central Nervous System Lymphoma, Primary Liver Cancer, Prostate Cancer, Rectal Cancer, Renal Cell Cancer, Renal Pelvis and Ureter Cancer, Retinoblastoma, Rhabdomyosarcoma, Salivary Gland Cancer, Sarcoidosis Sarcomas, Sezary Syndrome, Skin Cancer, Small Cell Lung Cancer, Small Intestine Cancer, Soft Tissue Sarcoma, Squamous Neck Cancer, Stomach Cancer, Supratentorial Primitive Neuroectodermal and Pineal Tumors, T-Cell Lymphoma, Testicular Cancer, Thymoma, Thyroid Cancer, Transitional Cell Cancer of the Renal Pelvis and Ureter, Transitional Renal Pelvis and Ureter Cancer, Trophoblastic Tumors, Ureter and Renal Pelvis Cell Cancer, Urethral Cancer, Uterine Cancer, Uterine Sarcoma, Vaginal Cancer, Visual Pathway and Hypothalamic Glioma, Vulvar Cancer, Waldenstrom's Macroglobulinemia, Wilms' Tumor, and any other hyperproliferative disease, besides neoplasia, located in an organ system listed above.

[0529] In another preferred embodiment, polynucleotides or polypeptides, or agonists or antagonists of the present invention are used to diagnose, prognose, prevent, and/or treat premalignant conditions and to prevent progression to a neoplastic or malignant state, including but not limited to those disorders described above. Such uses are indicated in conditions known or suspected of preceding progression to neoplasia or cancer, in particular, where non-neoplastic cell growth consisting of hyperplasia, metaplasia, or most particularly, dysplasia has occurred (for review of such abnormal growth conditions, see Robbins and Angell, 1976, Basic Pathology, 2d Ed., W. B. Saunders Co., Philadelphia, pp. 68-79.)

[0530] Hyperplasia is a form of controlled cell proliferation, involving an increase in cell number in a tissue or organ, without significant alteration in structure or function. Hyperplastic disorders which can be diagnosed, prognosed, prevented, and/or treated with compositions of the invention (including polynucleotides, polypeptides, agonists or antagonists) include, but are not limited to, angiofollicular mediastinal lymph node hyperplasia, angiolymphoid hyperplasia with eosinophilia, atypical melanocytic hyperplasia, basal cell hyperplasia, benign giant lymph node hyperplasia, cementum hyperplasia, congenital adrenal hyperplasia, congenital sebaceous hyperplasia, cystic hyperplasia, cystic hyperplasia of the breast, denture hyperplasia, ductal hyperplasia, endometrial hyperplasia, fibromuscular hyperplasia, focal epithelial hyperplasia, gingival hyperplasia, inflammatory fibrous hyperplasia, inflammatory papillary hyperplasia, intravascular papillary endothelial hyperplasia, nodular hyperplasia of prostate, nodular regenerative hyperplasia, pseudoepitheliomatous hyperplasia, senile sebaceous hyperplasia, and verrucous hyperplasia.

[0531] Metaplasia is a form of controlled cell growth in which one type of adult or fully differentiated cell substitutes for another type of adult cell. Metaplastic disorders which can be diagnosed, prognosed, prevented, and/or treated with compositions of the invention (including polynucleotides, polypeptides, agonists or antagonists) include, but are not limited to, agnogenic myeloid metaplasia, apocrine metaplasia, atypical metaplasia, autoparenchymatous metaplasia, connective tissue metaplasia, epithelial metaplasia, intestinal metaplasia, metaplastic anemia, metaplastic ossification, metaplastic polyps, myeloid metaplasia, primary myeloid metaplasia, secondary myeloid metaplasia, squamous metaplasia, squamous metaplasia of amnion, and symptomatic myeloid metaplasia.

[0532] Dysplasia is frequently a forerunner of cancer, and is found mainly in the epithelia; it is the most disorderly form of non-neoplastic cell growth, involving a loss in individual cell uniformity and in the architectural orientation of cells. Dysplastic cells often have abnormally large, deeply stained nuclei, and exhibit pleomorphism. Dysplasia characteristically occurs where there exists chronic irritation or inflammation. Dysplastic disorders which can be diagnosed, prognosed, prevented, and/or treated with compositions of the invention (including polynucleotides, polypeptides, agonists or antagonists) include, but are not limited to, anhidrotic ectodermal dysplasia, anterofacial dysplasia, asphyxiating thoracic dysplasia, atriodigital dysplasia, bronchopulmonary dysplasia, cerebral dysplasia, cervical dysplasia, chondroectodermal dysplasia, cleidocranial dysplasia, congenital ectodermal dysplasia, craniodiaphysial dysplasia, craniocarpotarsal dysplasia, craniometaphysial dysplasia, dentin dysplasia, diaphysial dysplasia, ectodermal dysplasia, enamel dysplasia, encephalo-ophthalmic dysplasia, dysplasia epiphysialis hemimelia, dysplasia epiphysialis multiplex, dysplasia epiphysialis punctata, epithelial dysplasia, faciodigitogenital dysplasia, familial fibrous dysplasia of jaws, familial white folded dysplasia, fibromuscular dysplasia, fibrous dysplasia of bone, florid osseous dysplasia, hereditary renal-retinal dysplasia, hidrotic ectodermal dysplasia, hypohidrotic ectodermal dysplasia, lymphopenic thymic dysplasia, mammary dysplasia, mandibulofacial dysplasia, metaphysial dysplasia, Mondini dysplasia, monostotic fibrous dysplasia, mucoepithelial dysplasia, multiple epiphysial dysplasia, oculoauriculovertebral dysplasia, oculodentodigital dysplasia, oculovertebral dysplasia, odontogenic dysplasia, ophthalmomandibulomelic dysplasia, periapical cemental dysplasia, polyostotic fibrous dysplasia, pseudoachondroplastic spondyloepiphysial dysplasia, retinal dysplasia, septo-optic dysplasia, spondyloepiphysial dysplasia, and ventriculoradial dysplasia.

[0533] Additional pre-neoplastic disorders which can be diagnosed, prognosed, prevented, and/or treated with compositions of the invention (including polynucleotides, polypeptides, agonists or antagonists) include, but are not limited to, benign dysproliferative disorders (e.g., benign tumors, fibrocystic conditions, tissue hypertrophy, intestinal polyps, colon polyps, and esophageal dysplasia), leukoplakia, keratoses, Bowen's disease, Farmer's Skin, solar cheilitis, and solar keratosis.

[0534] In another embodiment, polynucleotides, polypeptides, antibodies, and/or agonists or antagonists of the present invention conjugated to a toxin or a radioactive isotope, as described herein, may be used to treat cancers and neoplasms, including, but not limited to those described herein. In a further preferred embodiment, polynucleotides, polypeptides, antibodies, and/or agonists or antagonists of the present invention conjugated to a toxin or a radioactive isotope, as described herein, may be used to treat acute myelogenous leukemia.

[0535] Additionally, polynucleotides, polypeptides, and/or agonists or antagonists of the invention may affect apoptosis, and therefore, would be useful in treating a number of diseases associated with increased cell survival or the inhibition of apoptosis. For example, diseases associated with increased cell survival or the inhibition of apoptosis that could be diagnosed, prognosed, prevented, and/or treated by polynucleotides, polypeptides, and/or agonists or antagonists of the invention, include cancers (such as follicular lymphomas, carcinomas with p53 mutations, and hormone-dependent tumors, including, but not limited to colon cancer, cardiac tumors, pancreatic cancer, melanoma, retinoblastoma, glioblastoma, lung cancer, intestinal cancer, testicular cancer, stomach cancer, neuroblastoma, myxoma, myoma, lymphoma, endothelioma, osteoblastoma, osteoclastoma, osteosarcoma, chondrosarcoma, adenoma, breast cancer, prostate cancer, Kaposi's sarcoma and ovarian cancer); autoimmune disorders such as, multiple sclerosis, Sjogren's syndrome, Hashimoto's thyroiditis, biliary cirrhosis, Behcet's disease, Crohn's disease, polymyositis, systemic lupus erythematosus and immune-related glomerulonephritis and rheumatoid arthritis) and viral infections (such as herpes viruses, pox viruses and adenoviruses), inflammation, graft v. host disease, acute graft rejection, and chronic graft rejection.

[0536] In preferred embodiments, polynucleotides, polypeptides, and/or agonists or antagonists of the invention are used to inhibit growth, progression, and/or metastasis of cancers, in particular those listed above.

[0537] Additional diseases or conditions associated with increased cell survival that could be diagnosed, prognosed, prevented, and/or treated by polynucleotides, polypeptides, and/or agonists or antagonists of the invention, include, but are not limited to, progression, and/or metastases of malignancies and related disorders such as leukemia (including acute leukemias (e.g., acute lymphocytic leukemia, acute myelocytic leukemia (including myeloblastic, promyelocytic, myelomonocytic, monocytic, and erythroleukemia)) and chronic leukemias (e.g., chronic myelocytic (granulocytic) leukemia and chronic lymphocytic leukemia)), polycythemia vera, lymphomas (e.g., Hodgkin's disease and non-Hodgkin's disease), multiple myeloma, Waldenstrom's macroglobulinemia, heavy chain disease, and solid tumors including, but not limited to, sarcomas and carcinomas such as fibrosarcoma, myxosarcoma, liposarcoma, chondrosarcoma, osteogenic sarcoma, chordoma, angiosarcoma, endotheliosarcoma, lymphangiosarcoma, lymphangioendotheliosarcoma, synovioma, mesothelioma, Ewing's tumor, leiomyosarcoma, rhabdomyosarcoma, colon carcinoma, pancreatic cancer, breast cancer, ovarian cancer, prostate cancer, squamous cell carcinoma, basal cell carcinoma, adenocarcinoma, sweat gland carcinoma, sebaceous gland carcinoma, papillary carcinoma, papillary adenocarcinomas, cystadenocarcinoma, medullary carcinoma, bronchogenic carcinoma, renal cell carcinoma, hepatoma, bile duct carcinoma, choriocarcinoma, seminoma, embryonal carcinoma, Wilm's tumor, cervical cancer, testicular tumor, lung carcinoma, small cell lung carcinoma, bladder carcinoma, epithelial carcinoma, glioma, astrocytoma, medulloblastoma, craniopharyngioma, ependymoma, pinealoma, emangioblastoma, acoustic neuroma, oligodendroglioma, menangioma, melanoma, neuroblastoma, and retinoblastoma.

[0538] Diseases associated with increased apoptosis that could be diagnosed, prognosed, prevented, and/or treated by polynucleotides, polypeptides, and/or agonists or antagonists of the invention, include AIDS; neurodegenerative disorders (such as Alzheimer's disease, Parkinson's disease, amyotrophic lateral sclerosis, retinitis pigmentosa, cerebellar degeneration and brain tumor or prior associated disease); autoimmune disorders (such as, multiple sclerosis, Sjogren's syndrome, Hashimoto's thyroiditis, biliary cirrhosis, Behcet's disease, Crohn's disease, polymyositis, systemic lupus erythematosus and immune-related glomerulonephritis and rheumatoid arthritis) myelodysplastic syndromes (such as aplastic anemia), graft v. host disease, ischemic injury (such as that caused by myocardial infarction, stroke and reperfusion injury), liver injury (e.g., hepatitis related liver injury, ischemia/reperfusion injury, cholestosis (bile duct injury) and liver cancer); toxin-induced liver disease (such as that caused by alcohol), septic shock, cachexia and anorexia.

[0539] Hyperproliferative diseases and/or disorders that could be diagnosed, prognosed, prevented, and/or treated by polynucleotides, polypeptides, and/or agonists or antagonists of the invention, include, but are not limited to, neoplasms located in the liver, abdomen, bone, breast, digestive system, pancreas, peritoneum, endocrine glands (adrenal, parathyroid, pituitary, testicles, ovary, thymus, thyroid), eye, head and neck, nervous system (central and peripheral), lymphatic system, pelvis, skin, soft tissue, spleen, thorax, and urogenital tract.

[0540] Similarly, other hyperproliferative disorders can also be diagnosed, prognosed, prevented, and/or treated by polynucleotides, polypeptides, and/or agonists or antagonists of the invention. Examples of such hyperproliferative disorders include, but are not limited to: hypergammaglobulinemia, lymphoproliferative disorders, paraproteinemias, purpura, sarcoidosis, Sezary Syndrome, Waldenstron's macroglobulinemia, Gaucher's Disease, histiocytosis, and any other hyperproliferative disease, besides neoplasia, located in an organ system listed above.

[0541] One preferred embodiment utilizes polynucleotides of the present invention to inhibit aberrant cellular division, by gene therapy using the present invention, and/or protein fusions or fragments thereof.

[0542] Thus, the present invention provides a method for treating cell proliferative diseases, disorders, and/or conditions by inserting into an abnormally proliferating cell a polynucleotide of the present invention, wherein said polynucleotide represses said cell proliferation, disease, disorder, and/or condition.

[0543] In a preferred embodiment, the present invention provides a method for treating cell proliferative diseases, disorders and/or conditions of the lung by inserting into a cell, a polynucleotide of the present invention, wherein said polynucleotide represses said cell proliferation, disease and/or disorder.

[0544] Another embodiment of the present invention provides a method of treating cell-proliferative diseases, disorders, and/or conditions in individuals comprising administration of one or more active gene copies of the present invention to an abnormally proliferating cell or cells. In a preferred embodiment, polynucleotides of the present invention is a DNA construct comprising a recombinant expression vector effective in expressing a DNA sequence encoding said polynucleotides. In another preferred embodiment of the present invention, the DNA construct encoding the polynucleotides of the present invention is inserted into cells to be treated utilizing a retrovirus, or more preferably an adenoviral vector (see, e.g., G J. Nabel, et. al., PNAS 96: 324-326 (1999), which is hereby incorporated by reference). In a most preferred embodiment, the viral vector is defective and will not transform non-proliferating cells, only proliferating cells. Moreover, in a preferred embodiment, the polynucleotides of the present invention inserted into proliferating cells either alone, or in combination with or fused to other polynucleotides, can then be modulated via an external stimulus (i.e., magnetic, specific small molecule, chemical, or drug administration, etc.), which acts upon the promoter upstream of said polynucleotides to induce expression of the encoded protein product. As such the beneficial therapeutic affect of the present invention may be expressly modulated (i.e., to increase, decrease, or inhibit expression of the present invention) based upon said external stimulus.

[0545] Polynucleotides of the present invention may be useful in repressing expression of oncogenic genes or antigens. By “repressing expression of the oncogenic genes ” is intended the suppression of the transcription of the gene, the degradation of the gene transcript (pre-message RNA), the inhibition of splicing, the destruction of the messenger RNA, the prevention of the post-translational modifications of the protein, the destruction of the protein, or the inhibition of the normal function of the protein.

[0546] For local administration to abnormally proliferating cells, polynucleotides of the present invention may be administered by any method known to those of skill in the art including, but not limited to transfection, electroporation, microinjection of cells, or in vehicles such as liposomes, lipofectin, or as naked polynucleotides, or any other method described throughout the specification. The polynucleotide of the present invention may be delivered by known gene delivery systems such as, but not limited to, retroviral vectors (Gilboa, J. Virology 44:845 (1982); Hocke, Nature 320:275 (1986); Wilson, et al., Proc. Natl. Acad. Sci. U.S.A. 85:3014), vaccinia virus system (Chakrabarty et al., Mol. Cell Biol. 5:3403 (1985) or other efficient DNA delivery systems (Yates et al., Nature 313:812 (1985)) known to those skilled in the art. These references are exemplary only and are hereby incorporated by reference. In order to specifically deliver or transfect cells which are abnormally proliferating and spare non-dividing cells, it is preferable to utilize a retrovirus, or adenoviral (as described in the art and elsewhere herein) delivery system known to those of skill in the art. Since host DNA replication is required for retroviral DNA to integrate and the retrovirus will be unable to self replicate due to the lack of the retrovirus genes needed for its life cycle. Utilizing such a retroviral delivery system for polynucleotides of the present invention will target said gene and constructs to abnormally proliferating cells and will spare the non-dividing normal cells.

[0547] The polynucleotides of the present invention may be delivered directly to cell proliferative disorder/disease sites in internal organs, body cavities and the like by use of imaging devices used to guide an injecting needle directly to the disease site. The polynucleotides of the present invention may also be administered to disease sites at the time of surgical intervention.

[0548] By “cell proliferative disease” is meant any human or animal disease or disorder, affecting any one or any combination of organs, cavities, or body parts, which is characterized by single or multiple local abnormal proliferations of cells, groups of cells, or tissues, whether benign or malignant.

[0549] Any amount of the polynucleotides of the present invention may be administered as long as it has a biologically inhibiting effect on the proliferation of the treated cells. Moreover, it is possible to administer more than one of the polynucleotide of the present invention simultaneously to the same site. By “biologically inhibiting” is meant partial or total growth inhibition as well as decreases in the rate of proliferation or growth of the cells. The biologically inhibitory dose may be determined by assessing the effects of the polynucleotides of the present invention on target malignant or abnormally proliferating cell growth in tissue culture, tumor growth in animals and cell cultures, or any other method known to one of ordinary skill in the art.

[0550] The present invention is further directed to antibody-based therapies which involve administering of anti-polypeptides and anti-polynucleotide antibodies to a mammalian, preferably human, patient for treating one or more of the described diseases, disorders, and/or conditions. Methods for producing anti-polypeptides and anti-polynucleotide antibodies polyclonal and monoclonal antibodies are described in detail elsewhere herein. Such antibodies may be provided in pharmaceutically acceptable compositions as known in the art or as described herein.

[0551] A summary of the ways in which the antibodies of the present invention may be used therapeutically includes binding polynucleotides or polypeptides of the present invention locally or systemically in the body or by direct cytotoxicity of the antibody, e.g., as mediated by complement (CDC) or by effector cells (ADCC). Some of these approaches are described in more detail below. Armed with the teachings provided herein, one of ordinary skill in the art will know how to use the antibodies of the present invention for diagnostic, monitoring or therapeutic purposes without undue experimentation.

[0552] In particular, the antibodies, fragments and derivatives of the present invention are useful for treating a subject having or developing cell proliferative and/or differentiation diseases, disorders, and/or conditions as described herein. Such treatment comprises administering a single or multiple doses of the antibody, or a fragment, derivative, or a conjugate thereof.

[0553] The antibodies of this invention may be advantageously utilized in combination with other monoclonal or chimeric antibodies, or with lymphokines or hematopoietic growth factors, for example, which serve to increase the number or activity of effector cells which interact with the antibodies.

[0554] It is preferred to use high affinity and/or potent in vivo inhibiting and/or neutralizing antibodies against polypeptides or polynucleotides of the present invention, fragments or regions thereof, for both immunoassays directed to and therapy of diseases, disorders, and/or conditions related to polynucleotides or polypeptides, including fragments thereof, of the present invention. Such antibodies, fragments, or regions, will preferably have an affinity for polynucleotides or polypeptides, including fragments thereof. Preferred binding affinities include those with a dissociation constant or Kd less than 5×10⁻⁶M, 10⁻⁶M, 5×10⁻⁷M, 10⁻⁷M, 5×10⁻⁸M, 10⁻⁸M, 5×10⁻⁹M, 10⁻⁹M, 5×10⁻¹⁰M, 10⁻¹⁰M, 5×10⁻¹¹M, 10⁻¹¹M, 5×10⁻¹²M, 10⁻¹²M, 5×10⁻¹³M, 10⁻³M, 5×10⁻¹⁴M, 10⁻⁴M, 5×10⁻¹⁵M, and 10⁻¹⁵M.

[0555] Moreover, lung cancer antigen polypeptides of the present invention or fragments thereof, are useful in inhibiting the angiogenesis of proliferative cells or tissues, either alone, as a protein fusion, or in combination with other polypeptides directly or indirectly, as described elsewhere herein. In a most preferred embodiment, said anti-angiogenesis effect may be achieved indirectly, for example, through the inhibition of hematopoietic, tumor-specific cells, such as tumor-associated macrophages (see, e.g., Joseph IB, et al. J Natl Cancer Inst, 90(21):1648-53 (1998), which is hereby incorporated by reference). Antibodies directed to polypeptides or polynucleotides of the present invention may also result in inhibition of angiogenesis directly, or indirectly (see, e.g., Witte L, et al., Cancer Metastasis Rev. 17(2):155-61 (1998), which is hereby incorporated by reference)).

[0556] Polypeptides, including protein fusions, of the present invention, or fragments thereof may be useful in inhibiting proliferative cells or tissues through the induction of apoptosis. Said polypeptides may act either directly, or indirectly to induce apoptosis of proliferative cells and tissues, for example in the activation of a death-domain receptor, such as tumor necrosis factor (TNF) receptor-1, CD95 (Fas/APO-1), TNF-receptor-related apoptosis-mediated protein (TRAMP) and TNF-related apoptosis-inducing ligand (TRAIL) receptor-1 and -2 (see, e.g., Schulze-Osthoff K, et.al., Eur J Biochem 254(3):439-59 (1998), which is hereby incorporated by reference). Moreover, in another preferred embodiment of the present invention, said polypeptides may induce apoptosis through other mechanisms, such as in the activation of other proteins which will activate apoptosis, or through stimulating the expression of said proteins, either alone or in combination with small molecule drugs or adjuvants, such as apoptonin, galectins, thioredoxins, antiinflammatory proteins (See for example, Mutat. Res. 400(1-2):447-55 (1998), Med Hypotheses.50(5):423-33 (1998), Chem. Biol. Interact. Apr 24;111-112:23-34 (1998), J. Mo. Med. 76(6):402-12 (1998), Int. J. Tissue React. 20(1):3-15 (1998), which are all hereby incorporated by reference).

[0557] Polypeptides, including protein fusions to, or fragments thereof, of the present invention are useful in inhibiting the metastasis of proliferative cells or tissues. Inhibition may occur as a direct result of administering polypeptides, or antibodies directed to said polypeptides as described elsewhere herein, or indirectly, such as activating the expression of proteins known to inhibit metastasis, for example alpha 4 integrins, (See, e.g., Curr Top Microbiol Immunol 1998;231:12541, which is hereby incorporated by reference). Such therapeutic affects of the present invention may be achieved either alone, or in combination with small molecule drugs or adjuvants.

[0558] In another embodiment, the invention provides a method of delivering compositions containing the polypeptides of the invention (e.g., compositions containing polypeptides or anti-lung cancer antigen polypeptide antibodies associated with heterologous polypeptides, heterologous nucleic acids, toxins, or prodrugs) to targeted cells expressing the polypeptide of the present invention. lung cancer antigen polypeptides or anti-lung cancer antigen polypeptide antibodies of the invention may be associated with heterologous polypeptides, heterologous nucleic acids, toxins, or prodrugs via hydrophobic, hydrophilic, ionic and/or covalent interactions.

[0559] Polypeptides, protein fusions to, or fragments thereof, of the present invention are useful in enhancing the immunogenicity and/or antigenicity of proliferating cells or tissues, either directly, such as would occur if the polypeptides of the present invention ‘vaccinated’ the immune response to respond to proliferative antigens and immunogens, or indirectly, such as in activating the expression of proteins known to enhance the immune response (e.g. chemokines), to said antigens and immunogens.

[0560] Urinary System Disorders

[0561] Polynucleotides, polypeptides, antibodies, and/or agonists or antagonists of the present invention, may be used to treat, prevent, diagnose, and/or prognose disorders of the urinary system, including but not limited to disorders of the renal system, bladder, ureters, and urethra. Renal disorders include, but are not limited to, kidney failure, nephritis, blood vessel disorders of kidney, metabolic and congenital kidney disorders, urinary disorders of the kidney, autoimmune disorders, sclerosis and necrosis, electrolyte imbalance, and kidney cancers.

[0562] Kidney failure diseases include, but are not limited to, acute kidney failure, chronic kidney failure, atheroembolic renal failure, and end-stage renal disease. Inflammatory diseases of the kidney include acute glomerulonephritis, postinfectious glomerulonephritis, rapidly progressive glomerulonephritis, nephrotic syndrome, membranous glomerulonephritis, familial nephrotic syndrome, membranoproliferative glomerulonephritis I and II, mesangial proliferative glomerulonephritis, chronic glomerulonephritis, acute tubulointerstitial nephritis, chronic tubulointerstitial nephritis, acute post-streptococcal glomerulonephritis (PSGN), pyelonephritis, lupus nephritis, chronic nephritis, interstitial nephritis, and post-streptococcal glomerulonephritis.

[0563] Blood vessel disorders of the kidneys include, but are not limited to, kidney infarction, atheroembolic kidney disease, cortical necrosis, malignant nephrosclerosis, renal vein thrombosis, renal underperfusion, renal ischemia-reperfusion, renal artery embolism, and renal artery stenosis. Kidney disorders resulting form urinary tract problems include, but are not limited to, pyelonephritis, hydronephrosis, urolithiasis (renal lithiasis, nephrolithiasis), reflux nephropathy, urinary tract infections, urinary retention, and acute or chronic unilateral obstructive uropathy.

[0564] Metabolic and congenital disorders of the kidneys include, but are not limited to, renal tubular acidosis, renal glycosuria, nephrogenic diabetes insipidus, cystinuria, Fanconi's syndrome, vitamin D-resistant rickets, Hartnup disease, Bartter's syndrome, Liddle's syndrome, polycystic kidney disease, medullary cystic disease, medullary sponge kidney, Alport's syndrome, nail-patella syndrome, congenital nephrotic syndrome, CRUSH syndrome, horseshoe kidney, diabetic nephropathy, nephrogenic diabetes insipidus, analgesic nephropathy, kidney stones, and membranous nephropathy, Kidney disorders resulting from an autoimmune response include, but are not limited to, systemic lupus erythematosus (SLE), Goodpasture syndrome, IgA nephropathy, and IgM mesangial proliferative glomerulonephritis.

[0565] Sclerotic or necrotic disorders of the kidney include, but are not limited to, glomerulosclerosis, diabetic nephropathy, focal segmental glomerulosclerosis (FSGS), necrotizing glomerulonephritis, and renal papillary necrosis. Kidneys may also develop carcinomas, including, but not limited to, hypemephroma, nephroblastoma, renal cell cancer, transitional cell cancer, squamous cell cancer, and Wilm's tumor.

[0566] Kidney disorders may also result in electrolyte imbalances, including, but not limited to, nephrocalcinosis, pyuria, edema, hydronephritis, proteinuria, hyponatremia, hypematremia, hypokalemia, hyperkalemia, hypocalcemia, hypercalcemia, hypophosphatemia, and hyperphosphatemia.

[0567] Bladder disorders include, but are not limited to, benign prostatic hyperplasia (BPH), interstitial cystitis (IC), prostatitis, proteinuria, urinary tract infections, urinary incontinence, urinary retention. Disorders of the ureters and urethra include, but are not limited to, acute or chronic unilateral obstructive uropathy. The bladder, ureters, and urethra may also develop carcinomas, including, but not limited to, superficial bladder canccer, invasive bladder cancer, carcinoma of the ureter, and urethra cancers.

[0568] Polypeptides may be administered using any method known in the art, including, but not limited to, direct needle injection at the delivery site, intravenous injection, topical administration, catheter infusion, biolistic injectors, particle accelerators, gelfoam sponge depots, other commercially available depot materials, osmotic pumps, oral or suppositorial solid pharmaceutical formulations, decanting or topical applications during surgery, aerosol delivery. Such methods are known in the art. Polypeptides may be administered as part of a Therapeutic, described in more detail below. Methods of delivering polynucleotides are described in more detail herein.

[0569] Cardiovascular Disorders

[0570] Polynucleotides or polypeptides, or agonists or antagonists of the present invention, may be used to treat, prevent, diagnose, and/or prognose cardiovascular disorders, including, but not limited to, peripheral artery disease, such as limb ischemia.

[0571] Cardiovascular disorders include cardiovascular abnormalities, such as arterio-arterial fistula, arteriovenous fistula, cerebral arteriovenous malformations, congenital heart defects, pulmonary atresia, and Scimitar Syndrome. Congenital heart defects include aortic coarctation, cor triatriatum, coronary vessel anomalies, crisscross heart, dextrocardia, patent ductus arteriosus, Ebstein's anomaly, Eisenmenger complex, hypoplastic left heart syndrome, levocardia, tetralogy of fallot, transposition of great vessels, double outlet right ventricle, tricuspid atresia, persistent truncus arteriosus, total anomalous pulmonary venous connection, hypoplastic left heart syndrome, and heart septal defects, such as aortopulmonary septal defect, endocardial cushion defects, Lutembacher's Syndrome, atrioventricular canal defect, trilogy of Fallot, ventricular heart septal defects.

[0572] Cardiovascular disorders also include heart disease, such as arrhythmias, carcinoid heart disease, high cardiac output, low cardiac output, cardiac tamponade, endocarditis (including bacterial), heart aneurysm, cardiac arrest, sudden cardiac death, congestive heart failure, congestive cardiomyopathy, paroxysmal dyspnea, cardiac edema, heart hypertrophy, congestive cardiomyopathy, left ventricular hypertrophy, right ventricular hypertrophy, post-infarction heart rupture, ventricular septal rupture, heart valve diseases, myocardial diseases, myocardial ischemia, pericardial effusion, pericarditis (including constrictive and tuberculous), pneumopericardium, postpericardiotomy syndrome, pulmonary heart disease, rheumatic heart disease, ventricular dysfunction, hyperemia, cardiovascular pregnancy complications, Scimitar Syndrome, diastolic dysfunction, enlarged heart, heart block, J-curve phenomenon, rheumatic heart disease, Marfan syndrome, cardiovascular syphilis, and cardiovascular tuberculosis.

[0573] Arrhythmias include sinus arrhythmia, atrial fibrillation, atrial flutter, bradycardia, extrasystole, Adams-Stokes Syndrome, bundle-branch block, sinoatrial block, long QT syndrome, parasystole, Lown-Ganong-Levine Syndrome, Mahaim-type pre-excitation syndrome, Wolff-Parkinson-White syndrome, sick sinus syndrome, tachycardias, and ventricular fibrillation. Tachycardias include paroxysmal tachycardia, supraventricular tachycardia, accelerated idioventricular rhythm, atrioventricular nodal reentry tachycardia, ectopic atrial tachycardia, ectopic junctional tachycardia, sinoatrial nodal reentry tachycardia, sinus tachycardia, Torsades de Pointes, and ventricular tachycardia.

[0574] Heart valve disease include aortic valve insufficiency, aortic valve stenosis, heart murmurs, aortic valve prolapse, mitral valve prolapse, tricuspid valve prolapse, mitral valve insufficiency, mitral valve stenosis, pulmonary atresia, pulmonary valve insufficiency, pulmonary valve stenosis, tricuspid atresia, tricuspid valve insufficiency, tricuspid valve stenosis, and bicuspid aortic valve.

[0575] Myocardial diseases include alcoholic cardiomyopathy, congestive cardiomyopathy, hypertrophic cardiomyopathy, aortic subvalvular stenosis, pulmonary subvalvular stenosis, restrictive cardiomyopathy, Chagas cardiomyopathy, endocardial fibroelastosis, endomyocardial fibrosis, Kearns Syndrome, Barth syndrome, myocardial reperfusion injury, and myocarditis.

[0576] Myocardial ischemias include coronary disease, such as angina pectoris, Prinzmetal's angina, unstable angina, coronary aneurysm, coronary arteriosclerosis, coronary thrombosis, coronary vasospasm, myocardial infarction and myocardial stunning.

[0577] Cardiovascular diseases also include vascular diseases such as aneurysms, angiodysplasia, angiomatosis, bacillary angiomatosis, lippel-Lindau Disease, Klippel-Trenaunay-Weber Syndrome, Sturge-Weber Syndrome, angioneurotic edema, aortic diseases, Takayasu's Arteritis, aortitis, Leriche's Syndrome, arterial occlusive diseases, arteritis, enarteritis, polyarteritis nodosa, cerebrovascular disorders, diabetic angiopathies, diabetic retinopathy, embolisms, thrombosis, erythromelalgia, hemorrhoids, hepatic veno-occlusive disease, hypertension, hypotension (shock), ischemia, peripheral vascular diseases, phlebitis, superficial phlebitis, pulmonary veno-occlusive disease, chronic obstructive pulmonary disease, Buerger's disease, Raynaud's disease, CREST syndrome, retinal vein occlusion, Scimitar syndrome, superior vena cava syndrome, telangiectasia, atacia telangiectasia, hereditary hemorrhagic telangiectasia, deep vein thrombosis, varicocele, varicose veins, varicose ulcer, vasculitis, and venous insufficiency.

[0578] Aneurysms include dissecting aneurysms, false aneurysms, infected aneurysms, ruptured aneurysms, aortic aneurysms, cerebral aneurysms, coronary aneurysms, heart aneurysms, and iliac aneurysms.

[0579] Arterial occlusive diseases include arteriosclerosis, arteriolosclerosis, atherosclerosis, intermittent claudication, carotid stenosis, fibromuscular dysplasias, mesenteric vascular occlusion, Moyamoya disease, renal artery obstruction, retinal artery occlusion, and thromboangiitis obliterans.

[0580] Cerebrovascular disorders include carotid artery diseases, cerebral amyloid angiopathy, cerebral aneurysm, cerebral anoxia, cerebral arteriosclerosis, cerebral arteriovenous malformation, cerebral artery diseases, cerebral embolism and thrombosis, carotid artery thrombosis, sinus thrombosis, Wallenberg's syndrome, cerebral hemorrhage, epidural hematoma, subdural hematoma, subaraxhnoid hemorrhage, cerebral infarction, cerebral ischemia (including transient), subclavian steal syndrome, periventricular leukomalacia, vascular headache, cluster headache, migraine, and vertebrobasilar insufficiency.

[0581] Embolisms include air embolisms, amniotic fluid embolisms, cholesterol embolisms, blue toe syndrome, fat embolisms, pulmonary embolisms, and thromoboembolisms. Thrombosis include coronary thrombosis, hepatic vein thrombosis, deep vein thrombosis, retinal vein occlusion, carotid artery thrombosis, sinus thrombosis, Wallenberg's syndrome, and thrombophlebitis.

[0582] Ischemia includes cerebral ischemia, ischemic colitis, silent ischemia, compartment syndromes, anterior compartment syndrome, myocardial ischemia, reperfusion injuries, and peripheral limb ischemia. Vasculitis includes aortitis, arteritis, Behcet's Syndrome, Churg-Strauss Syndrome, mucocutaneous lymph node syndrome, thromboangiitis obliterans, hypersensitivity vasculitis, Schoenlein-Henoch purpura, allergic cutaneous vasculitis, and Wegener's granulomatosis.

[0583] Cardiovascular diseases can also occur due to electrolyte imbalances that include, but are not limited to hyponatremia, hypernatremia, hypokalemia, hyperkalemia, hypocalcemia, hypercalcemia, hypophosphatemia, and hyperphophatemia. Neoplasm and/or cancers of the cardiovascular system include, but are not limited to, myxomas, fibromas, and rhabdomyomas.

[0584] Polypeptides may be administered using any method known in the art, including, but not limited to, direct needle injection at the delivery site, intravenous injection, topical administration, catheter infusion, biolistic injectors, particle accelerators, gelfoam sponge depots, other commercially available depot materials, osmotic pumps, oral or suppositorial solid pharmaceutical formulations, decanting or topical applications during surgery, aerosol delivery. Such methods are known in the art. Polypeptides may be administered as part of a Therapeutic, described in more detail below. Methods of delivering polynucleotides are described in more detail herein.

[0585] Anti-angiogenesis Activity

[0586] The naturally occurring balance between endogenous stimulators and inhibitors of angiogenesis is one in which inhibitory influences predominate. Rastinejad et al., Cell 56:345-355 (1989). In those rare instances in which neovascularization occurs under normal physiological conditions, such as wound healing, organ regeneration, embryonic development, and female reproductive processes, angiogenesis is stringently regulated and spatially and temporally delimited. Under conditions of pathological angiogenesis such as that characterizing solid tumor growth, these regulatory controls fail. Unregulated angiogenesis becomes pathologic and sustains progression of many neoplastic and non-neoplastic diseases. A number of serious diseases are dominated by abnormal neovascularization including solid tumor growth and metastases, arthritis, some types of eye disorders, and psoriasis. See, e.g., reviews by Moses et al., Biotech. 9:630-634 (1991); Folkman et al., N. Engl. J. Med., 333:1757-1763 (1995); Auerbach et al., J. Microvasc. Res. 29:401-411 (1985); Folkman, Advances in Cancer Research, eds. Klein and Weinhouse, Academic Press, New York, pp. 175-203 (1985); Patz, Am. J. OpthalmoL 94:715-743 (1982); and Folkman et al., Science 221:719-725 (1983). In a number of pathological conditions, the process of angiogenesis contributes to the disease state. For example, significant data have accumulated which suggest that the growth of solid tumors is dependent on angiogenesis. Folkman and KIagsbrun, Science 235:442-447 (1987).

[0587] The present invention provides for treatment of diseases or disorders associated with neovascularization by administration of the polynucleotides and/or polypeptides of the invention, as well as agonists or antagonists of the present invention. Malignant and metastatic conditions which can be treated with the polynucleotides and polypeptides, or agonists or antagonists of the invention include, but are not limited to, malignancies, solid tumors, and cancers described herein and otherwise known in the art (for a review of such disorders, see Fishman et al., Medicine, 2d Ed., J. B. Lippincott Co., Philadelphia (1985)). Thus, the present invention provides a method of treating an angiogenesis-related disease and/or disorder, comprising administration to an individual in need thereof a therapeutically effective amount of a polynucleotide, polypeptide, antagonist and/or agonist of the invention. For example, polynucleotides, polypeptides, antagonists and/or agonists may be utilized in a variety of additional methods in order to therapeutically treat a cancer or tumor. Cancers which may be treated with polynucleotides, polypeptides, antagonists and/or agonists include, but are not limited to solid tumors, including prostate, lung, breast, ovarian, stomach, pancreas, larynx, esophagus, testes, liver, parotid, biliary tract, colon, rectum, cervix, uterus, endometrium, kidney, bladder, thyroid cancer; primary tumors and metastases; melanomas; glioblastoma; Kaposi's sarcoma; leiomyosarcoma; non- small cell lung cancer; colorectal cancer; advanced malignancies; and blood born tumors such as leukemias. For example, polynucleotides, polypeptides, antagonists and/or agonists may be delivered topically, in order to treat cancers such as skin cancer, head and neck tumors, breast tumors, and Kaposi's sarcoma.

[0588] Within yet other aspects, polynucleotides, polypeptides, antagonists and/or agonists may be utilized to treat superficial forms of bladder cancer by, for example, intravesical administration. Polynucleotides, polypeptides, antagonists and/or agonists may be delivered directly into the tumor, or near the tumor site, via injection or a catheter. Of course, as the artisan of ordinary skill will appreciate, the appropriate mode of administration will vary according to the cancer to be treated. Other modes of delivery are discussed herein.

[0589] Polynucleotides, polypeptides, antagonists and/or agonists may be useful in treating other disorders, besides cancers, which involve angiogenesis. These disorders include, but are not limited to: benign tumors, for example hemangiomas, acoustic neuromas, neurofibromas, trachomas, and pyogenic granulomas; artheroscleric plaques; ocular angiogenic diseases, for example, diabetic retinopathy, retinopathy of prematurity, macular degeneration, corneal graft rejection, neovascular glaucoma, retrolental fibroplasia, rubeosis, retinoblastoma, uvietis and Pterygia (abnormal blood vessel growth) of the eye; rheumatoid arthritis; psoriasis; delayed wound healing; endometriosis; vasculogenesis; granulations; hypertrophic scars (keloids); nonunion fractures; scleroderma; trachoma; vascular adhesions; myocardial angiogenesis; coronary collaterals; cerebral collaterals; arteriovenous malformations; ischemic limb angiogenesis; Osler-Webber Syndrome; plaque neovascularization; telangiectasia; hemophiliac joints; angiofibroma; fibromuscular dysplasia; wound granulation; Crohn's disease; and atherosclerosis.

[0590] For example, within one aspect of the present invention methods are provided for treating hypertrophic scars and keloids, comprising the step of administering a polynucleotide, polypeptide, antagonist and/or agonist of the invention to a hypertrophic scar or keloid.

[0591] Within one embodiment of the present invention polynucleotides, polypeptides, antagonists and/or agonists of the invention are directly injected into a hypertrophic scar or keloid, in order to prevent the progression of these lesions. This therapy is of particular value in the prophylactic treatment of conditions which are known to result in the development of hypertrophic scars and keloids (e.g., bums), and is preferably initiated after the proliferative phase has had time to progress (approximately 14 days after the initial injury), but before hypertrophic scar or keloid development. As noted above, the present invention also provides methods for treating neovascular diseases of the eye, including for example, comeal neovascularization, neovascular glaucoma, proliferative diabetic retinopathy, retrolental fibroplasia and macular degeneration.

[0592] Moreover, ocular disorders associated with neovascularization which can be treated with the polynucleotides and polypeptides of the present invention (including agonists and/or antagonists) include, but are not limited to: neovascular glaucoma, diabetic retinopathy, retinoblastoma, retrolental fibroplasia, uveitis, retinopathy of prematurity macular degeneration, corneal graft neovascularization, as well as other eye inflammatory diseases, ocular tumors and diseases associated with choroidal or iris neovascularization. See, e.g., reviews by Waltman et al., Am. J. Ophthal. 85:704-710 (1978) and Gartner et al., Surv. Ophthal. 22:291-312 (1978).

[0593] Thus, within one aspect of the present invention methods are provided for treating neovascular diseases of the eye such as corneal neovascularization (including corneal graft neovascularization), comprising the step of administering to a patient a therapeutically effective amount of a compound (as described above) to the cornea, such that the formation of blood vessels is inhibited. Briefly, the cornea is a tissue, which normally lacks blood vessels. In certain pathological conditions however, capillaries may extend into the cornea from the pericorneal vascular plexus of the limbus. When the cornea becomes vascularized, it also becomes clouded, resulting in a decline in the patient's visual acuity. Visual loss may become complete if the cornea completely opacitates. A wide variety of disorders can result in corneal neovascularization, including for example, comeal infections (e.g., trachoma, herpes simplex keratitis, leishmaniasis and onchocerciasis), immunological processes (e.g., graft rejection and Stevens-Johnson's syndrome), alkali burns, trauma, inflammation (of any cause), toxic and nutritional deficiency states, and as a complication of wearing contact lenses.

[0594] Within particularly preferred embodiments of the invention, may be prepared for topical administration in saline (combined with any of the preservatives and antimicrobial agents commonly used in ocular preparations), and administered in eyedrop form. The solution or suspension may be prepared in its pure form and administered several times daily. Alternatively, anti-angiogenic compositions, prepared as described above, may also be administered directly to the cornea. Within preferred embodiments, the anti-angiogenic composition is prepared with a muco-adhesive polymer, which binds to cornea. Within further embodiments, the anti-angiogenic factors or anti-angiogenic compositions may be utilized as an adjunct to conventional steroid therapy. Topical therapy may also be useful prophylactically in corneal lesions which are known to have a high probability of inducing an angiogenic response (such as chemical burns). In these instances the treatment, likely in combination with steroids, may be instituted immediately to help prevent subsequent complications.

[0595] Within other embodiments, the compounds described above may be injected directly into the corneal stroma by an ophthalmologist under microscopic guidance. The preferred site of injection may vary with the morphology of the individual lesion, but the goal of the administration would be to place the composition at the advancing front of the vasculature (i.e., interspersed between the blood vessels and the normal cornea). In most cases this would involve perilimbic corneal injection to “protect” the cornea from the advancing blood vessels. This method may also be utilized shortly after a corneal insult in order to prophylactically prevent corneal neovascularization. In this situation, the material could be injected in the perilimbic cornea interspersed between the corneal lesion and its undesired potential limbic blood supply. Such methods may also be utilized in a similar fashion to prevent capillary invasion of transplanted corneas. In a sustained-release form, injections might only be required 2-3 times per year. A steroid could also be added to the injection solution to reduce inflammation resulting from the injection itself.

[0596] Within another aspect of the present invention, methods are provided for treating neovascular glaucoma, comprising the step of administering to a patient a therapeutically effective amount of a polynucleotide, polypeptide, antagonist and/or agonist to the eye, such that the formation of blood vessels is inhibited. In one embodiment, the compound may be administered topically to the eye in order to treat early forms of neovascular glaucoma. Within other embodiments, the compound may be implanted by injection into the region of the anterior chamber angle. Within other embodiments, the compound may also be placed in any location such that the compound is continuously released into the aqueous humor. Within another aspect of the present invention, methods are provided for treating proliferative diabetic retinopathy, comprising the step of administering to a patient a therapeutically effective amount of a polynucleotide, polypeptide, antagonist and/or agonist to the eyes, such that the formation of blood vessels is inhibited.

[0597] Within particularly preferred embodiments of the invention, proliferative diabetic retinopathy may be treated by injection into the aqueous humor or the vitreous, in order to increase the local concentration of the polynucleotide, polypeptide, antagonist and/or agonist in the retina. Preferably, this treatment should be initiated prior to the acquisition of severe disease requiring photocoagulation.

[0598] Within another aspect of the present invention, methods are provided for treating retrolental fibroplasia, comprising the step of administering to a patient a therapeutically effective amount of a polynucleotide, polypeptide, antagonist and/or agonist to the eye, such that the formation of blood vessels is inhibited. The compound may be administered topically, via intravitreous injection and/or via intraocular implants.

[0599] Additionally, disorders which can be treated with the polynucleotides, polypeptides, agonists and/or agonists include, but are not limited to, hemangioma, arthritis, psoriasis, angiofibroma, atherosclerotic plaques, delayed wound healing, granulations, hemophilic joints, hypertrophic scars, nonunion fractures, Osler-Weber syndrome, pyogenic granuloma, scleroderma, trachoma, and vascular adhesions.

[0600] Moreover, disorders and/or states, which can be treated, prevented, diagnosed and/or prognosed with the polynucleotides, polypeptides, agonists and/or agonists of the invention include, but are not limited to, solid tumors, blood born tumors such as leukemias, tumor metastasis, Kaposi's sarcoma, benign tumors, for example hemangiomas, acoustic neuromas, neurofibromas, trachomas, and pyogenic granulomas, rheumatoid arthritis, psoriasis, ocular angiogenic diseases, for example, diabetic retinopathy, retinopathy of prematurity, macular degeneration, corneal graft rejection, neovascular glaucoma, retrolental fibroplasia, rubeosis, retinoblastoma, and uvietis, delayed wound healing, endometriosis, vascluogenesis, granulations, hypertrophic scars (keloids), nonunion fractures, scleroderma, trachoma, vascular adhesions, myocardial angiogenesis, coronary collaterals, cerebral collaterals, arteriovenous malformations, ischemic limb angiogenesis, Osler-Webber Syndrome, plaque neovascularization, telangiectasia, hemophiliac joints, angiofibroma fibromuscular dysplasia, wound granulation, Crohn's disease, atherosclerosis, birth control agent by preventing vascularization required for embryo implantation controlling menstruation, diseases that have angiogenesis as a pathologic consequence such as cat scratch disease (Rochele minalia quintosa), ulcers (Helicobacter pylori), Bartonellosis and bacillary angiomatosis.

[0601] In one aspect of the birth control method, an amount of the compound sufficient to block embryo implantation is administered before or after intercourse and fertilization have occurred, thus providing an effective method of birth control, possibly a “morning after” method. Polynucleotides, polypeptides, agonists and/or agonists may also be used in controlling menstruation or administered as either a peritoneal lavage fluid or for peritoneal implantation in the treatment of endometriosis.

[0602] Polynucleotides, polypeptides, agonists and/or agonists of the present invention may be incorporated into surgical sutures in order to prevent stitch granulomas.

[0603] Polynucleotides, polypeptides, agonists and/or agonists may be utilized in a wide variety of surgical procedures. For example, within one aspect of the present invention a compositions (in the form of, for example, a spray or film) may be utilized to coat or spray an area prior to removal of a tumor, in order to isolate normal surrounding tissues from malignant tissue, and/or to prevent the spread of disease to surrounding tissues. Within other aspects of the present invention, compositions (e.g., in the form of a spray) may be delivered via endoscopic procedures in order to coat tumors, or inhibit angiogenesis in a desired locale. Within yet other aspects of the present invention, surgical meshes, which have been coated with anti- angiogenic compositions of the present invention may be utilized in any procedure wherein a surgical mesh might be utilized. For example, within one embodiment of the invention a surgical mesh laden with an anti-angiogenic composition may be utilized during abdominal cancer resection surgery (e.g., subsequent to colon resection) in order to provide support to the structure, and to release an amount of the anti-angiogenic factor.

[0604] Within further aspects of the present invention, methods are provided for treating tumor excision sites, comprising administering a polynucleotide, polypeptide, agonist and/or agonist to the resection margins of a tumor subsequent to excision, such that the local recurrence of cancer and the formation of new blood vessels at the site is inhibited. Within one embodiment of the invention, the anti-angiogenic compound is administered directly to the tumor excision site (e.g., applied by swabbing, brushing or otherwise coating the resection margins of the tumor with the anti-angiogenic compound). Alternatively, the anti-angiogenic compounds may be incorporated into known surgical pastes prior to administration. Within particularly preferred embodiments of the invention, the anti-angiogenic compounds are applied after hepatic resections for malignancy, and after neurosurgical operations.

[0605] Within one aspect of the present invention, polynucleotides, polypeptides, agonists and/or agonists may be administered to the resection margin of a wide variety of tumors, including for example, breast, colon, brain and hepatic tumors. For example, within one embodiment of the invention, anti-angiogenic compounds may be administered to the site of a neurological tumor subsequent to excision, such that the formation of new blood vessels at the site are inhibited.

[0606] The polynucleotides, polypeptides, agonists and/or agonists of the present invention may also be administered along with other anti-angiogenic factors. Representative examples of other anti-angiogenic factors include: Anti-Invasive Factor, retinoic acid and derivatives thereof, paclitaxel, Suramin, Tissue Inhibitor of Metalloproteinase-1, Tissue Inhibitor of Metalloproteinase-2, Plasminogen Activator Inhibitor-1, Plasminogen Activator Inhibitor-2, and various forms of the lighter “d group” transition metals.

[0607] Lighter “d group” transition metals include, for example, vanadium, molybdenum, tungsten, titanium, niobium, and tantalum species. Such transition metal species may form transition metal complexes. Suitable complexes of the above-mentioned transition metal species include oxo transition metal complexes.

[0608] Representative examples of vanadium complexes include oxo vanadium complexes such as vanadate and vanadyl complexes. Suitable vanadate complexes include metavanadate and orthovanadate complexes such as, for example, ammonium metavanadate, sodium metavanadate, and sodium orthovanadate. Suitable vanadyl complexes include, for example, vanadyl acetylacetonate and vanadyl sulfate including vanadyl sulfate hydrates such as vanadyl sulfate mono- and trihydrates.

[0609] Representative examples of tungsten and molybdenum complexes also include oxo complexes. Suitable oxo tungsten complexes include tungstate and tungsten oxide complexes. Suitable tungstate complexes include ammonium tungstate, calcium tungstate, sodium tungstate dihydrate, and tungstic acid. Suitable tungsten oxides include tungsten (IV) oxide and tungsten (VI) oxide. Suitable oxo molybdenum complexes include molybdate, molybdenum oxide, and molybdenyl complexes. Suitable molybdate complexes include ammonium molybdate and its hydrates, sodium molybdate and its hydrates, and potassium molybdate and its hydrates. Suitable molybdenum oxides include molybdenum (VI) oxide, molybdenum (VI) oxide, and molybdic acid. Suitable molybdenyl complexes include, for example, molybdenyl acetylacetonate. Other suitable tungsten and molybdenum complexes include hydroxo derivatives derived from, for example, glycerol, tartaric acid, and sugars.

[0610] A wide variety of other anti-angiogenic factors may also be utilized within the context of the present invention. Representative examples include platelet factor 4; protamine sulphate; sulphated chitin derivatives (prepared from queen crab shells), (Murata et al., Cancer Res. 51:22-26 (1991)); Sulphated Polysaccharide Peptidoglycan Complex (SP- PG) (the function of this compound may be enhanced by the presence of steroids such as estrogen, and tamoxifen citrate); Staurosporine; modulators of matrix metabolism, including for example, proline analogs, cishydroxyproline, d,L-3,4-dehydroproline, Thiaproline, alpha,alpha-dipyridyl, aminopropionitrile fumarate; 4-propyl-5-(4-pyridinyl)-2(3H)-oxazolone; Methotrexate; Mitoxantrone; Heparin; Interferons; 2 Macroglobulin-serum; ChIMP-3 (Pavloff et al., J. Bio. Chem. 267:17321-17326 (1992)); Chymostatin (Tomkinson et al., Biochem J. 286:475480 (1992)); Cyclodextrin Tetradecasulfate; Eponemycin; Camptothecin; Fumagillin (Ingber et al., Nature 348:555-557 (1990)); Gold Sodium Thiomalate (“GST”; Matsubara and Ziff, J. Clin. Invest. 79:1440-1446 (1987)); anticollagenase-serum; alpha2-antiplasmin (Holmes et al., J. Biol. Chem. 262(4):1659-1664 (1987)); Bisantrene (National Cancer Institute); Lobenzarit disodium (N-(2)-carboxyphenyl-4- chloroanthronilic acid disodium or “CCA”; Takeuchi et al., Agents Actions 36:312-316, 1992); Thalidomide; Angostatic steroid; AGM-1470; carboxynaminolmidazole; and metalloproteinase inhibitors such as BB94.

[0611] Musculoskeletal System Disorders

[0612] Polynucleotides, polypeptides, antibodies, and/or agonists or antagonists of the present invention, may be used to treat, prevent, diagnose, and/or prognose disorders of the musculoskeletal system, including but not limited to, disorders of the bone, joints, ligaments, tendons, bursa, muscle, and/or neoplasms and cancers associated with musculoskeletal tissue.

[0613] Diseases or disorders of the bone include, but are not limited to, Albers-Schönberg disease, bowlegs, heel spurs, Kohler's bone disease, knock-knees, Legg-Calve-Perthes disease, Marfan's syndrome, mucopolysaccharidoses, Osgood-Schlatter disease, osteochondroses, osteochondrodysplasia, osteomyelitis, osteopetroses, osteoporosis (postmenopausal, senile, and juvenile), Paget's disease, Scheuermann's disease, scoliosis, Sever's disease, and patellofemoral stress syndrome.

[0614] Joint diseases or disorders include, but are not limited to, ankylosing spondylitis, Behcet's syndrome, CREST syndrome, Ehlers-Danlos syndrome, infectious arthritis, discoid lupus erythematosus, systemic lupus erythematosus, Lyme disease, osteoarthritis, psoriatic arthritis, relapsing polychondrites, Reiter's syndrome, rheumatoid arthritis (adult and juvenile), scleroderma, and Still's disease.

[0615] Diseases or disorders affecting ligaments, tendons, or bursa include, but are not limited to, ankle sprain, bursitis, posterior Achilles tendon bursitis (Haglund's deformity), anterior Achilles tendon bursitis (Albert's disease), tendinitis, tenosynovitis, poplieus tendinitis, Achilles tendinitis, medial or lateral epicondylitis, rotator cuff tendinitis, spasmodic torticollis, and fibromyalgia syndrome.

[0616] Muscle diseases or disorders include, but are not limited to, Becker's muscular dystrophy, Duchenne's muscular dystrophy, Landouzy-Dejerine muscular dystrophy, Leyden-Möbius muscular dystrophy, Erb's muscular dystrophy, Charcot's joints, dermatomyositis, gout, pseudogout, glycogen storage diseases, Pompe's disease, mitochondrial myopathy, periodic paralysis, polymyalgia rheumatica, polymyositis, Steinert's disease, Thomsen's disease, anterolateral and posteromedial shin splints, posterior femoral muscle strain, and fibromyositis.

[0617] Musculoskeletal tissue may also develop cancers and/or neoplasms that include, but are not limited to, osteochondroma, benign chondroma, chondroblastoma, chondromyxoid fibroma, osteoid osteoma, giant cell tumor, multiple myeloma, osteosarcoma, fibrosarcoma, malignant fibrous histiocytoma, chondrosarcoma, Ewing's tumor, and malignant lymphoma of bone.

[0618] Neural Activity and Neurological Diseases

[0619] The polynucleotides, polypeptides and agonists or antagonists of the invention may be used for the diagnosis and/or treatment of diseases, disorders, damage or injury of the brain and/or nervous system. Nervous system disorders that can be treated with the compositions of the invention (e.g., polypeptides, polynucleotides, and/or agonists or antagonists), include, but are not limited to, nervous system injuries, and diseases or disorders which result in either a disconnection of axons, a diminution or degeneration of neurons, or demyelination. Nervous system lesions which may be treated in a patient (including human and non-human mammalian patients) according to the methods of the invention, include but are not limited to, the following lesions of either the central (including spinal cord, brain) or peripheral nervous systems: (1) ischemic lesions, in which a lack of oxygen in a portion of the nervous system results in neuronal injury or death, including cerebral infarction or ischemia, or spinal cord infarction or ischemia; (2) traumatic lesions, including lesions caused by physical injury or associated with surgery, for example, lesions which sever a portion of the nervous system, or compression injuries; (3) malignant lesions, in which a portion of the nervous system is destroyed or injured by malignant tissue which is either a nervous system associated malignancy or a malignancy derived from non-nervous system tissue; (4) infectious lesions, in which a portion of the nervous system is destroyed or injured as a result of infection, for example, by an abscess or associated with infection by human immunodeficiency virus, herpes zoster, or herpes simplex virus or with Lyme disease, tuberculosis, or syphilis; (5) degenerative lesions, in which a portion of the nervous system is destroyed or injured as a result of a degenerative process including but not limited to, degeneration associated with Parkinson's disease, Alzheimer's disease, Huntington's chorea, or amyotrophic lateral sclerosis (ALS); (6) lesions associated with nutritional diseases or disorders, in which a portion of the nervous system is destroyed or injured by a nutritional disorder or disorder of metabolism including, but not limited to, vitamin B12 deficiency, folic acid deficiency, Wemicke disease, tobacco-alcohol amblyopia, Marchiafava-Bignami disease (primary degeneration of the corpus callosum), and alcoholic cerebellar degeneration; (7) neurological lesions associated with systemic diseases including, but not limited to, diabetes (diabetic neuropathy, Bell's palsy), systemic lupus erythematosus, carcinoma, or sarcoidosis; (8) lesions caused by toxic substances including alcohol, lead, or particular neurotoxins; and (9) demyelinated lesions in which a portion of the nervous system is destroyed or injured by a demyelinating disease including, but not limited to, multiple sclerosis, human immunodeficiency virus-associated myelopathy, transverse myelopathy or various etiologies, progressive multifocal leukoencephalopathy, and central pontine myelinolysis.

[0620] In one embodiment, the polypeptides, polynucleotides, or agonists or antagonists of the invention are used to protect neural cells from the damaging effects of hypoxia. In a further preferred embodiment, the polypeptides, polynucleotides, or agonists or antagonists of the invention are used to protect neural cells from the damaging effects of cerebral hypoxia. According to this embodiment, the compositions of the invention are used to treat or prevent neural cell injury associated with cerebral hypoxia. In one non-exclusive aspect of this embodiment, the polypeptides, polynucleotides, or agonists or antagonists of the invention, are used to treat or prevent neural cell injury associated with cerebral ischemia. In another non-exclusive aspect of this embodiment, the polypeptides, polynucleotides, or agonists or antagonists of the invention are used to treat or prevent neural cell injury associated with cerebral infarction.

[0621] In another preferred embodiment, the polypeptides, polynucleotides, or agonists or antagonists of the invention are used to treat or prevent neural cell injury associated with a stroke. In a specific embodiment, the polypeptides, polynucleotides, or agonists or antagonists of the invention are used to treat or prevent cerebral neural cell injury associated with a stroke.

[0622] In another preferred embodiment, the polypeptides, polynucleotides, or agonists or antagonists of the invention are used to treat or prevent neural cell injury associated with a heart attack. In a specific embodiment, the polypeptides, polynucleotides, or agonists or antagonists of the invention are used to treat or prevent cerebral neural cell injury associated with a heart attack.

[0623] The compositions of the invention which are useful for treating or preventing a nervous system disorder may be selected by testing for biological activity in promoting the survival or differentiation of neurons. For example, and not by way of limitation, compositions of the invention which elicit any of the following effects may be useful according to the invention: (1) increased survival time of neurons in culture either in the presence or absence of hypoxia or hypoxic conditions; (2) increased sprouting of neurons in culture or in vivo; (3) increased production of a neuron-associated molecule in culture or in vivo, e.g., choline acetyltransferase or acetylcholinesterase with respect to motor neurons; or (4) decreased symptoms of neuron dysfunction in vivo. Such effects may be measured by any method known in the art. In preferred, non-limiting embodiments, increased survival of neurons may routinely be measured using a method set forth herein or otherwise known in the art, such as, for example, in Zhang et al., Proc Natl Acad Sci USA 97:3637-42 (2000) or in Arakawa et al., J. Neurosci., 10:3507-15 (1990); increased sprouting of neurons may be detected by methods known in the art, such as, for example, the methods set forth in Pestronk et al., Exp. Neurol., 70:65-82 (1980), or Brown et al., Ann. Rev. Neurosci., 4:17-42 (1981); increased production of neuron-associated molecules may be measured by bioassay, enzymatic assay, antibody binding, Northern blot assay, etc., using techniques known in the art and depending on the molecule to be measured; and motor neuron dysfunction may be measured by assessing the physical manifestation of motor neuron disorder, e.g., weakness, motor neuron conduction velocity, or functional disability.

[0624] In specific embodiments, motor neuron disorders that may be treated according to the invention include, but are not limited to, disorders such as infarction, infection, exposure to toxin, trauma, surgical damage, degenerative disease or malignancy that may affect motor neurons as well as other components of the nervous system, as well as disorders that selectively affect neurons such as amyotrophic lateral sclerosis, and including, but not limited to, progressive spinal muscular atrophy, progressive bulbar palsy, primary lateral sclerosis, infantile and juvenile muscular atrophy, progressive bulbar paralysis of childhood (Fazio-Londe syndrome), poliomyelitis and the post polio syndrome, and Hereditary Motorsensory Neuropathy (Charcot-Marie-Tooth Disease).

[0625] Further, polypeptides or polynucleotides of the invention may play a role in neuronal survival; synapse formation; conductance; neural differentiation, etc. Thus, compositions of the invention (including polynucleotides, polypeptides, and agonists or antagonists) may be used to diagnose and/or treat or prevent diseases or disorders associated with these roles, including, but not limited to, learning and/or cognition disorders. The compositions of the invention may also be useful in the treatment or prevention of neurodegenerative disease states and/or behavioural disorders. Such neurodegenerative disease states and/or behavioral disorders include, but are not limited to, Alzheimer's Disease, Parkinson's Disease, Huntington's Disease, Tourette Syndrome, schizophrenia, mania, dementia, paranoia, obsessive compulsive disorder, panic disorder, learning disabilities, ALS, psychoses, autism, and altered behaviors, including disorders in feeding, sleep patterns, balance, and perception. In addition, compositions of the invention may also play a role in the treatment, prevention and/or detection of developmental disorders associated with the developing embryo, or sexually-linked disorders.

[0626] Additionally, polypeptides, polynucleotides and/or agonists or antagonists of the invention, may be useful in protecting neural cells from diseases, damage, disorders, or injury, associated with cerebrovascular disorders including, but not limited to, carotid artery diseases (e.g., carotid artery thrombosis, carotid stenosis, or Moyamoya Disease), cerebral amyloid angiopathy, cerebral aneurysm, cerebral anoxia, cerebral arteriosclerosis, cerebral arteriovenous malformations, cerebral artery diseases, cerebral embolism and thrombosis (e.g., carotid artery thrombosis, sinus thrombosis, or Wallenberg's Syndrome), cerebral hemorrhage (e.g., epidural or subdural hematoma, or subarachnoid hemorrhage), cerebral infarction, cerebral ischemia (e.g., transient cerebral ischemia, Subclavian Steal Syndrome, or vertebrobasilar insufficiency), vascular dementia (e.g., multi-infarct), leukomalacia, periventricular, and vascular headache (e.g., cluster headache or migraines).

[0627] In accordance with yet a further aspect of the present invention, there is provided a process for utilizing polynucleotides or polypeptides, as well as agonists or antagonists of the present invention, for therapeutic purposes, for example, to stimulate neurological cell proliferation and/or differentiation. Therefore, polynucleotides, polypeptides, agonists and/or antagonists of the invention may be used to treat and/or detect neurologic diseases. Moreover, polynucleotides or polypeptides, or agonists or antagonists of the invention, can be used as a marker or detector of a particular nervous system disease or disorder.

[0628] Examples of neurologic diseases which can be treated or detected with polynucleotides, polypeptides, agonists, and/or antagonists of the present invention include brain diseases, such as metabolic brain diseases which includes phenylketonuria such as maternal phenylketonuria, pyruvate carboxylase deficiency, pyruvate dehydrogenase complex deficiency, Wernicke's Encephalopathy, brain edema, brain neoplasms such as cerebellar neoplasms which include infratentorial neoplasms, cerebral ventricle neoplasms such as choroid plexus neoplasms, hypothalamic neoplasms, supratentorial neoplasms, canavan disease, cerebellar diseases such as cerebellar ataxia which include spinocerebellar degeneration such as ataxia telangiectasia, cerebellar dyssynergia, Friederich's Ataxia, Machado-Joseph Disease, olivopontocerebellar atrophy, cerebellar neoplasms such as infratentorial neoplasms, diffuse cerebral sclerosis such as encephalitis periaxialis, globoid cell leukodystrophy, metachromatic leukodystrophy and subacute sclerosing panencephalitis.

[0629] Additional neurologic diseases which can be treated or detected with polynucleotides, polypeptides, agonists, and/or antagonists of the present invention include cerebrovascular disorders (such as carotid artery diseases which include carotid artery thrombosis, carotid stenosis and Moyamoya Disease), cerebral amyloid angiopathy, cerebral aneurysm, cerebral anoxia, cerebral arteriosclerosis, cerebral arteriovenous malformations, cerebral artery diseases, cerebral embolism and thrombosis such as carotid artery thrombosis, sinus thrombosis and Wallenberg's Syndrome, cerebral hemorrhage such as epidural hematoma, subdural hematoma and subarachnoid hemorrhage, cerebral infarction, cerebral ischemia such as transient cerebral ischemia, Subclavian Steal Syndrome and vertebrobasilar insufficiency, vascular dementia such as multi-infarct dementia, periventricular leukomalacia, vascular headache such as cluster headache and migraine.

[0630] Additional neurologic diseases which can be treated or detected with polynucleotides, polypeptides, agonists, and/or antagonists of the present invention include dementia such as AIDS Dementia Complex, presenile dementia such as Alzheimer's Disease and Creutzfeldt-Jakob Syndrome, senile dementia such as Alzheimer's Disease and progressive supranuclear palsy, vascular dementia such as multi-infarct dementia, encephalitis which include encephalitis periaxialis, viral encephalitis such as epidemic encephalitis, Japanese Encephalitis, St. Louis Encephalitis, tick-borne encephalitis and West Nile Fever, acute disseminated encephalomyelitis, meningoencephalitis such as uveomeningoencephalitic syndrome, Postencephalitic Parkinson Disease and subacute sclerosing panencephalitis, encephalomalacia such as periventricular leukomalacia, epilepsy such as generalized epilepsy which includes infantile spasms, absence epilepsy, myoclonic epilepsy which includes MERRF Syndrome, tonic-clonic epilepsy, partial epilepsy such as complex partial epilepsy, frontal lobe epilepsy and temporal lobe epilepsy, post-traumatic epilepsy, status epilepticus such as Epilepsia Partialis Continua, and Hallervorden-Spatz Syndrome.

[0631] Additional neurologic diseases which can be treated or detected with polynucleotides, polypeptides, agonists, and/or antagonists of the present invention include hydrocephalus such as Dandy-Walker Syndrome and normal pressure hydrocephalus, hypothalamic diseases such as hypothalamic neoplasms, cerebral malaria, narcolepsy which includes cataplexy, bulbar poliomyelitis, cerebri pseudotumor, Rett Syndrome, Reye's Syndrome, thalamic diseases, cerebral toxoplasmosis, intracranial tuberculoma and Zellweger Syndrome, central nervous system infections such as AIDS Dementia Complex, Brain Abscess, subdural empyema, encephalomyelitis such as Equine Encephalomyelitis, Venezuelan Equine Encephalomyelitis, Necrotizing Hemorrhagic Encephalomyelitis, Visna, and cerebral malaria.

[0632] Additional neurologic diseases which can be treated or detected with polynucleotides, polypeptides, agonists, and/or antagonists of the present invention include meningitis such as arachnoiditis, aseptic meningtitis such as viral meningtitis which includes lymphocytic choriomeningitis, Bacterial meningtitis which includes Haemophilus Meningtitis, Listeria Meningtitis, Meningococcal Meningtitis such as Waterhouse-Friderichsen Syndrome, Pneumococcal Meningtitis and meningeal tuberculosis, fungal meningitis such as Cryptococcal Meningtitis, subdural effusion, meningoencephalitis such as uvemeningoencephalitic syndrome, myelitis such as transverse myelitis, neurosyphilis such as tabes dorsalis, poliomyelitis which includes bulbar poliomyelitis and postpoliomyelitis syndrome, prion diseases (such as Creutzfeldt-Jakob Syndrome, Bovine Spongiform Encephalopathy, Gerstmann-Straussler Syndrome, Kuru, Scrapie), and cerebral toxoplasmosis.

[0633] Additional neurologic diseases which can be treated or detected with polynucleotides, polypeptides, agonists, and/or antagonists of the present invention include central nervous system neoplasms such as brain neoplasms that include cerebellar neoplasms such as infratentorial neoplasms, cerebral ventricle neoplasms such as choroid plexus neoplasms, hypothalamic neoplasms and supratentorial neoplasms, meningeal neoplasms, spinal cord neoplasms which include epidural neoplasms, demyelinating diseases such as Canavan Diseases, diffuse cerebral sceloris which includes adrenoleukodystrophy, encephalitis periaxialis, globoid cell leukodystrophy, diffuse cerebral sclerosis such as metachromatic leukodystrophy, allergic encephalomyelitis, necrotizing hemorrhagic encephalomyelitis, progressive multifocal leukoencephalopathy, multiple sclerosis, central pontine myelinolysis, transverse myelitis, neuromyelitis optica, Scrapie, Swayback, Chronic Fatigue Syndrome, Visna, High Pressure Nervous Syndrome, Meningism, spinal cord diseases such as amyotonia congenita, amyotrophic lateral sclerosis, spinal muscular atrophy such as Werdnig-Hoffmann Disease, spinal cord compression, spinal cord neoplasms such as epidural neoplasms, syringomyelia, Tabes Dorsalis, Stiff-Man Syndrome, mental retardation such as Angelman Syndrome, Cri-du-Chat Syndrome, De Lange's Syndrome, Down Syndrome, Gangliosidoses such as gangliosidoses M1), Sandhoff Disease, Tay-Sachs Disease, Hartnup Disease, homocystinuria, Laurence-Moon- Biedl Syndrome, Lesch-Nyhan Syndrome, Maple Syrup Urine Disease, mucolipidosis such as fucosidosis, neuronal ceroid-lipofuscinosis, oculocerebrorenal syndrome, phenylketonuria such as maternal phenylketonuria, Prader-Willi Syndrome, Rett Syndrome, Rubinstein-Taybi Syndrome, Tuberous Sclerosis, WAGR Syndrome, nervous system abnormalities such as holoprosencephaly, neural tube defects such as anencephaly which includes hydrangencephaly, Amold-Chairi Deformity, encephalocele, meningocele, meningomyelocele, spinal dysraphism such as spina bifida cystica and spina bifida occulta.

[0634] Additional neurologic diseases which can be treated or detected with polynucleotides, polypeptides, agonists, and/or antagonists of the present invention include hereditary motor and sensory neuropathies which include Charcot-Marie Disease, Hereditary optic atrophy, Refsum's Disease, hereditary spastic paraplegia, Werdnig-Hoffmann Disease, Hereditary Sensory and Autonomic Neuropathies such as Congenital Analgesia and Familial Dysautonomia, Neurologic manifestations (such as agnosia that include Gerstmann's Syndrome, Amnesia such as retrograde amnesia, apraxia, neurogenic bladder, cataplexy, communicative disorders such as hearing disorders that includes deafness, partial hearing loss, loudness recruitment and tinnitus, language disorders such as aphasia which include agraphia, anomia, broca aphasia, and Wernicke Aphasia, Dyslexia such as Acquired Dyslexia, language development disorders, speech disorders such as aphasia which includes anomia, broca aphasia and Wernicke Aphasia, articulation disorders, communicative disorders such as speech disorders which include dysarthria, echolalia, mutism and stuttering, voice disorders such as aphonia and hoarseness, decerebrate state, delirium, fasciculation, hallucinations, meningism, movement disorders such as angelman syndrome, ataxia, athetosis, chorea, dystonia, hypokinesia, muscle hypotonia, myoclonus, tic, torticollis and tremor, muscle hypertonia such as muscle rigidity such as stiff-man syndrome, muscle spasticity, paralysis such as facial paralysis which includes Herpes Zoster Oticus, Gastroparesis, Hemiplegia, ophthalmoplegia such as diplopia, Duane's Syndrome, Horner's Syndrome, Chronic progressive external ophthalmoplegia such as Kearns Syndrome, Bulbar Paralysis, Tropical Spastic Paraparesis, Paraplegia such as Brown-Sequard Syndrome, quadriplegia, respiratory paralysis and vocal cord paralysis, paresis, phantom limb, taste disorders such as ageusia and dysgeusia, vision disorders such as amblyopia, blindness, color vision defects, diplopia, hemianopsia, scotoma and subnormal vision, sleep disorders such as hypersomnia which includes Kleine-Levin Syndrome, insomnia, and somnambulism, spasm such as trismus, unconsciousness such as coma, persistent vegetative state and syncope and vertigo, neuromuscular diseases such as amyotonia congenita, amyotrophic lateral sclerosis, Lambert-Eaton Myasthenic Syndrome, motor neuron disease, muscular atrophy such as spinal muscular atrophy, Charcot-Marie Disease and Werdnig-Hoffmann Disease, Postpoliomyelitis Syndrome, Muscular Dystrophy, Myasthenia Gravis, Myotonia Atrophica, Myotonia Confenita, Nemaline Myopathy, Familial Periodic Paralysis, Multiplex Paramyloclonus, Tropical Spastic Paraparesis and Stiff-Man Syndrome, peripheral nervous system diseases such as acrodynia, amyloid neuropathies, autonomic nervous system diseases such as Adie's Syndrome, Barre-Lieou Syndrome, Familial Dysautonomia, Horner's Syndrome, Reflex Sympathetic Dystrophy and Shy-Drager Syndrome, Cranial Nerve Diseases such as Acoustic Nerve Diseases such as Acoustic Neuroma which includes Neurofibromatosis 2, Facial Nerve Diseases such as Facial Neuralgia,Melkersson-Rosenthal Syndrome, ocular motility disorders which includes amblyopia, nystagmus, oculomotor nerve paralysis, ophthalmoplegia such as Duane's Syndrome, Horner's Syndrome, Chronic Progressive External Ophthalmoplegia which includes Kearns Syndrome, Strabismus such as Esotropia and Exotropia, Oculomotor Nerve Paralysis, Optic Nerve Diseases such as Optic Atrophy which includes Hereditary Optic Atrophy, Optic Disk Drusen, Optic Neuritis such as Neuromyelitis Optica, Papilledema, Trigeminal Neuralgia, Vocal Cord Paralysis, Demyelinating Diseases such as Neuromyelitis Optica and Swayback, and Diabetic neuropathies such as diabetic foot.

[0635] Additional neurologic diseases which can be treated or detected with polynucleotides, polypeptides, agonists, and/or antagonists of the present invention include nerve compression syndromes such as carpal tunnel syndrome, tarsal tunnel syndrome, thoracic outlet syndrome such as cervical rib syndrome, ulnar nerve compression syndrome, neuralgia such as causalgia, cervico-brachial neuralgia, facial neuralgia and trigeminal neuralgia, neuritis such as experimental allergic neuritis, optic neuritis, polyneuritis, polyradiculoneuritis and radiculities such as polyradiculitis, hereditary motor and sensory neuropathies such as Charcot-Marie Disease, Hereditary Optic Atrophy, Refsum's Disease, Hereditary Spastic Paraplegia and Werdnig-Hoffmann Disease, Hereditary Sensory and Autonomic Neuropathies which include Congenital Analgesia and Familial Dysautonomia, POEMS Syndrome, Sciatica, Gustatory Sweating and Tetany).

[0636] Endocrine Disorders

[0637] Polynucleotides or polypeptides, or agonists or antagonists of the present invention, may be used to treat, prevent, diagnose, and/or prognose disorders and/or diseases related to hormone imbalance, and/or disorders or diseases of the endocrine system.

[0638] Hormones secreted by the glands of the endocrine system control physical growth, sexual function, metabolism, and other functions. Disorders may be classified in two ways: disturbances in the production of hormones, and the inability of tissues to respond to hormones. The etiology of these hormone imbalance or endocrine system diseases, disorders or conditions may be genetic, somatic, such as cancer and some autoimmune diseases, acquired (e.g., by chemotherapy, injury or toxins), or infectious. Moreover, polynucleotides, polypeptides, antibodies, and/or agonists or antagonists of the present invention can be used as a marker or detector of a particular disease or disorder related to the endocrine system and/or hormone imbalance.

[0639] Endocrine system and/or hormone imbalance and/or diseases encompass disorders of uterine motility including, but not limited to: complications with pregnancy and labor (e.g., pre-term labor, post-term pregnancy, spontaneous abortion, and slow or stopped labor); and disorders and/or diseases of the menstrual cycle (e.g., dysmenorrhea and endometriosis).

[0640] Endocrine system and/or hormone imbalance disorders and/or diseases include disorders and/or diseases of the pancreas, such as, for example, diabetes mellitus, diabetes insipidus, congenital pancreatic agenesis, pheochromocytoma—islet cell tumor syndrome; disorders and/or diseases of the adrenal glands such as, for example, Addison's Disease, corticosteroid deficiency, virilizing disease, hirsutism, Cushing's Syndrome, hyperaldosteronism, pheochromocytoma; disorders and/or diseases of the pituitary gland, such as, for example, hyperpituitarism, hypopituitarism, pituitary dwarfism, pituitary adenoma, panhypopituitarism, acromegaly, gigantism; disorders and/or diseases of the thyroid, including but not limited to, hyperthyroidism, hypothyroidism, Plummer's disease, Graves' disease (toxic diffuse goiter), toxic nodular goiter, thyroiditis (Hashimoto's thyroiditis, subacute granulomatous thyroiditis, and silent lymphocytic thyroiditis), Pendred's syndrome, myxedema, cretinism, thyrotoxicosis, thyroid hormone coupling defect, thymic aplasia, Hurthle cell tumours of the thyroid, thyroid cancer, thyroid carcinoma, Medullary thyroid carcinoma; disorders and/or diseases of the parathyroid, such as, for example, hyperparathyroidism, hypoparathyroidism; disorders and/or diseases of the hypothalamus.

[0641] In addition, endocrine system and/or hormone imbalance disorders and/or diseases may also include disorders and/or diseases of the testes or ovaries, including cancer. Other disorders and/or diseases of the testes or ovaries further include, for example, ovarian cancer, polycystic ovary syndrome, Klinefelter's syndrome, vanishing testes syndrome (bilateral anorchia), congenital absence of Leydig's cells, cryptorchidism, Noonan's syndrome, myotonic dystrophy, capillary haemangioma of the testis (benign), neoplasias of the testis and neo-testis.

[0642] Moreover, endocrine system and/or hormone imbalance disorders and/or diseases may also include disorders and/or diseases such as, for example, polyglandular deficiency syndromes, pheochromocytoma, neuroblastoma, multiple Endocrine neoplasia, and disorders and/or cancers of endocrine tissues.

[0643] Gastrointestinal Disorders

[0644] Polynucleotides or polypeptides, or agonists or antagonists of the present invention, may be used to treat, prevent, diagnose, and/or prognose gastrointestinal disorders, including inflammatory diseases and/or conditions, infections, cancers (e.g., intestinal neoplasms (carcinoid tumor of the small intestine, non-Hodgkin's lymphoma of the small intestine, small bowl lymphoma)), and ulcers, such as peptic ulcers.

[0645] Gastrointestinal disorders include dysphagia, odynophagia, inflammation of the esophagus, peptic esophagitis, gastric reflux, submucosal fibrosis and stricturing, Mallory-Weiss lesions, leiomyomas, lipomas, epidermal cancers, adeoncarcinomas, gastric retention disorders, gastroenteritis, gastric atrophy, gastric/stomach cancers, polyps of the stomach, autoimmune disorders such as pernicious anemia, pyloric stenosis, gastritis (bacterial, viral, eosinophilic, stress-induced, chronic erosive, atrophic, plasma cell, and Ménétrier's), and peritoneal diseases (e.g., chyloperioneum, hemoperitoneum, mesenteric cyst, mesenteric lymphadenitis, mesenteric vascular occlusion, panniculitis, neoplasms, peritonitis, pneumoperitoneum, bubphrenic abscess).

[0646] Gastrointestinal disorders also include disorders associated with the small intestine, such as malabsorption syndromes, distension, irritable bowel syndrome, sugar intolerance, celiac disease, duodenal ulcers, duodenitis, tropical sprue, Whipple's disease, intestinal lymphangiectasia, Crohn's disease, appendicitis, obstructions of the ileum, Meckel's diverticulum, multiple diverticula, failure of complete rotation of the small and large intestine, lymphoma, and bacterial and parasitic diseases (such as Traveler's diarrhea, typhoid and paratyphoid, cholera, infection by Roundworms (Ascariasis lumbricoides), Hookworms (Ancylostoma duodenale), Threadworms (Enterobius vermicularis), Tapeworms (Taenia saginata, Echinococcus granulosus, Diphyllobothrium spp., and T. solium).

[0647] Liver diseases and/or disorders include intrahepatic cholestasis (alagille syndrome, biliary liver cirrhosis), fatty liver (alcoholic fatty liver, reye syndrome), hepatic vein thrombosis, hepatolentricular degeneration, hepatomegaly, hepatopulmonary syndrome, hepatorenal syndrome, portal hypertension (esophageal and gastric varices), liver abscess (amebic liver abscess), liver cirrhosis (alcoholic, biliary and experimental), alcoholic liver diseases (fatty liver, hepatitis, cirrhosis), parasitic (hepatic echinococcosis, fascioliasis, amebic liver abscess), jaundice (hemolytic, hepatocellular, and cholestatic), cholestasis, portal hypertension, liver enlargement, ascites, hepatitis (alcoholic hepatitis, animal hepatitis, chronic hepatitis (autoimmune, hepatitis B, hepatitis C, hepatitis D, drug induced), toxic hepatitis, viral human hepatitis (hepatitis A, hepatitis B, hepatitis C, hepatitis D, hepatitis E), Wilson's disease, granulomatous hepatitis, secondary biliary cirrhosis, hepatic encephalopathy, portal hypertension, varices, hepatic encephalopathy, primary biliary cirrhosis, primary sclerosing cholangitis, hepatocellular adenoma, hemangiomas, bile stones, liver failure (hepatic encephalopathy, acute liver failure), and liver neoplasms (angiomyolipoma, calcified liver metastases, cystic liver metastases, epithelial tumors, fibrolamellar hepatocarcinoma, focal nodular hyperplasia, hepatic adenoma, hepatobiliary cystadenoma, hepatoblastoma, hepatocellular carcinoma, hepatoma, liver cancer, liver hemangioendothelioma, mesenchymal hamartoma, mesenchymal tumors of liver, nodular regenerative hyperplasia, benign liver tumors (Hepatic cysts [Simple cysts, Polycystic liver disease, Hepatobiliary cystadenoma, Choledochal cyst], Mesenchymal tumors [Mesenchymal hamartoma, Infantile hemangioendothelioma, Hemangioma, Peliosis hepatis, Lipomas, Inflammatory pseudotumor, Miscellaneous], Epithelial tumors [Bile duct epithelium (Bile duct hamartoma, Bile duct adenoma), Hepatocyte (Adenoma, Focal nodular hyperplasia, Nodular regenerative hyperplasia)], malignant liver tumors [hepatocellular, hepatoblastoma, hepatocellular carcinoma, cholangiocellular, cholangiocarcinoma, cystadenocarcinoma, tumors of blood vessels, angiosarcoma, Karposi's sarcoma, hemangioendothelioma, other tumors, embryonal sarcoma, fibrosarcoma, leiomyosarcoma, rhabdomyosarcoma, carcinosarcoma, teratoma, carcinoid, squamous carcinoma, primary lymphoma]), peliosis hepatis, erythrohepatic porphyria, hepatic porphyria (acute intermittent porphyria, porphyria cutanea tarda), Zellweger syndrome).

[0648] Pancreatic diseases and/or disorders include acute pancreatitis, chronic pancreatitis (acute necrotizing pancreatitis, alcoholic pancreatitis), neoplasms (adenocarcinoma of the pancreas, cystadenocarcinoma, insulinoma, gastrinoma, and glucagonoma, cystic neoplasms, islet-cell tumors, pancreoblastoma), and other pancreatic diseases (e.g., cystic fibrosis, cyst (pancreatic pseudocyst, pancreatic fistula, insufficiency)).

[0649] Gallbladder diseases include gallstones (cholelithiasis and choledocholithiasis), postcholecystectomy syndrome, diverticulosis of the gallbladder, acute cholecystitis, chronic cholecystitis, bile duct tumors, and mucocele.

[0650] Diseases and/or disorders of the large intestine include antibiotic-associated colitis, diverticulitis, ulcerative colitis, acquired megacolon, abscesses, fungal and bacterial infections, anorectal disorders (e.g., fissures, hemorrhoids), colonic diseases (colitis, colonic neoplasms [colon cancer, adenomatous colon polyps (e.g., villous adenoma), colon carcinoma, colorectal cancer], colonic diverticulitis, colonic diverticulosis, megacolon [Hirschsprung disease, toxic megacolon]; sigmoid diseases [proctocolitis, sigmoin neoplasms]), constipation, Crohn's disease, diarrhea (infantile diarrhea, dysentery), duodenal diseases (duodenal neoplasms, duodenal obstruction, duodenal ulcer, duodenitis), enteritis (enterocolitis), HIV enteropathy, ileal diseases (ileal neoplasms, ileitis), immunoproliferative small intestinal disease, inflammatory bowel disease (ulcerative colitis, Crohn's disease), intestinal atresia, parasitic diseases (anisakiasis, balantidiasis, blastocystis infections, cryptosporidiosis, dientamoebiasis, amebic dysentery, giardiasis), intestinal fistula (rectal fistula), intestinal neoplasms (cecal neoplasms, colonic neoplasms, duodenal neoplasms, ileal neoplasms, intestinal polyps, jejunal neoplasms, rectal neoplasms), intestinal obstruction (afferent loop syndrome, duodenal obstruction, impacted feces, intestinal pseudo-obstruction [cecal volvulus], intussusception), intestinal perforation, intestinal polyps (colonic polyps, gardner syndrome, peutz-jeghers syndrome), jejunal diseases (jejunal neoplasms), malabsorption syndromes (blind loop syndrome, celiac disease, lactose intolerance, short bowl syndrome, tropical sprue, whipple's disease), mesenteric vascular occlusion, pneumatosis cystoides intestinalis, protein-losing enteropathies (intestinal lymphagiectasis), rectal diseases (anus diseases, fecal incontinence, hemorrhoids, proctitis, rectal fistula, rectal prolapse, rectocele), peptic ulcer (duodenal ulcer, peptic esophagitis, hemorrhage, perforation, stomach ulcer, Zollinger-Ellison syndrome), postgastrectomy syndromes (dumping syndrome), stomach diseases (e.g., achlorhydria, duodenogastric reflux (bile reflux), gastric antral vascular ectasia, gastric fistula, gastric outlet obstruction, gastritis (atrophic or hypertrophic), gastroparesis, stomach dilatation, stomach diverticulum, stomach neoplasms (gastric cancer, gastric polyps, gastric adenocarcinoma, hyperplastic gastric polyp), stomach rupture, stomach ulcer, stomach volvulus), tuberculosis, visceroptosis, vomiting (e.g., hematemesis, hyperemesis gravidarum, postoperative nausea and vomiting) and hemorrhagic colitis.

[0651] Further diseases and/or disorders of the gastrointestinal system include biliary tract diseases, such as, gastroschisis, fistula (e.g., biliary fistula, esophageal fistula, gastric fistula, intestinal fistula, pancreatic fistula), neoplasms (e.g., biliary tract neoplasms, esophageal neoplasms, such as adenocarcinoma of the esophagus, esophageal squamous cell carcinoma, gastrointestinal neoplasms, pancreatic neoplasms, such as adenocarcinoma of the pancreas, mucinous cystic neoplasm of the pancreas, pancreatic cystic neoplasms, pancreatoblastoma, and peritoneal neoplasms), esophageal disease (e.g., bullous diseases, candidiasis, glycogenic acanthosis, ulceration, barrett esophagus varices, atresia, cyst, diverticulum (e.g., Zenker's diverticulum), fistula (e.g., tracheoesophageal fistula), motility disorders (e.g., CREST syndrome, deglutition disorders, achalasia, spasm, gastroesophageal reflux), neoplasms, perforation (e.g., Boerhaave syndrome, Mallory-Weiss syndrome), stenosis, esophagitis, diaphragmatic hernia (e.g., hiatal hernia); gastrointestinal diseases, such as, gastroenteritis (e.g., cholera morbus, norwalk virus infection), hemorrhage (e.g., hematemesis, melena, peptic ulcer hemorrhage), stomach neoplasms (gastric cancer, gastric polyps, gastric adenocarcinoma, stomach cancer)), hernia (e.g., congenital diaphragmatic hernia, femoral hernia, inguinal hernia, obturator hernia, umbilical hernia, ventral hernia), and intestinal diseases (e.g., cecal diseases (appendicitis, cecal neoplasms)). Reproductive System Disorders

[0652] The polynucleotides or polypeptides, or agonists or antagonists of the invention may be used for the diagnosis, treatment, or prevention of diseases and/or disorders of the reproductive system. Reproductive system disorders that can be treated by the compositions of the invention, include, but are not limited to, reproductive system injuries, infections, neoplastic disorders, congenital defects, and diseases or disorders which result in infertility, complications with pregnancy, labor, or parturition, and postpartum difficulties.

[0653] Reproductive system disorders and/or diseases include diseases and/or disorders of the testes, including, but not limited to, testicular atrophy, testicular feminization, cryptorchism (unilateral and bilateral), anorchia, ectopic testis, epididymitis and orchitis (typically resulting from infections such as, for example, gonorrhea, mumps, tuberculosis, and syphilis), testicular torsion, vasitis nodosa, germ cell tumors (e.g., seminomas, embryonal cell carcinomas, teratocarcinomas, choriocarcinomas, yolk sac tumors, and teratomas), stromal tumors (e.g., Leydig cell tumors), hydrocele, hematocele, varicocele, sperrnatocele, inguinal hernia, and disorders of sperm production (e.g., immotile cilia syndrome, aspermia, asthenozoospermia, azoospermia, oligospermia, and teratozoospermia).

[0654] Reproductive system disorders also include, but are not limited to, disorders of the prostate gland, such as acute non-bacterial prostatitis, chronic non-bacterial prostatitis, acute bacterial prostatitis, chronic bacterial prostatitis, prostatodystonia, prostatosis, granulomatous prostatitis, malacoplakia, benign prostatic hypertrophy or hyperplasia, and prostate neoplastic disorders, including adenocarcinomas, transitional cell carcinomas, ductal carcinomas, and squamous cell carcinomas.

[0655] Additionally, the compositions of the invention may be useful in the diagnosis, treatment, and/or prevention of disorders or diseases of the penis and urethra, including, but not limited to, inflammatory disorders, such as balanoposthitis, balanitis xerotica obliterans, phimosis, paraphimosis, syphilis, herpes simplex virus, gonorrhea, non-gonococcal urethritis, chlamydia, mycoplasma, trichomonas, HIV, AIDS, Reiter's syndrome, condyloma acuminatum, condyloma latum, and pearly penile papules; urethral abnormalities, such as hypospadias, epispadias, and phimosis; premalignant lesions, including Erythroplasia of Queyrat, Bowen's disease, Bowenoid paplosis, giant condyloma of Buscke-Lowenstein, and varrucous carcinoma; penile cancers, including squamous cell carcinomas, carcinoma in situ, verrucous carcinoma, and disseminated penile carcinoma; urethral neoplastic disorders, including penile urethral carcinoma, bulbomembranous urethral carcinoma, and prostatic urethral carcinoma; and erectile disorders, such as priapism, Peyronie's disease, erectile dysfunction, and impotence.

[0656] Moreover, diseases and/or disorders of the vas deferens include, but are not limited to, vasculititis and CBAVD (congenital bilateral absence of the vas deferens); additionally, the polynucleotides, polypeptides, and agonists or antagonists of the present invention may be used in the diagnosis, treatment, and/or prevention of diseases and/or disorders of the seminal vesicles, including but not limited to, hydatid disease, congenital chloride diarrhea, and polycystic kidney disease.

[0657] Other disorders and/or diseases of the male reproductive system that may be diagnosed, treated, and/or prevented with the compositions of the invention include, but are not limited to, Klinefelter's syndrome, Young's syndrome, premature ejaculation, diabetes mellitus, cystic fibrosis, Kartagener's syndrome, high fever, multiple sclerosis, and gynecomastia.

[0658] Further, the polynucleotides, polypeptides, and agonists or antagonists of the present invention may be used in the diagnosis, treatment, and/or prevention of diseases and/or disorders of the vagina and vulva, including, but not limited to, bacterial vaginosis, candida vaginitis, herpes simplex virus, chancroid, granuloma inguinale, lymphogranuloma venereum, scabies, human papillomavirus, vaginal trauma, vulvar trauma, adenosis, chlamydia vaginitis, gonorrhea, trichomonas vaginitis, condyloma acuminatum, syphilis, molluscum contagiosum, atrophic vaginitis, Paget's disease, lichen sclerosus, lichen planus, vulvodynia, toxic shock syndrome, vaginismus, vulvovaginitis, vulvar vestibulitis, and neoplastic disorders, such as squamous cell hyperplasia, clear cell carcinoma, basal cell carcinoma, melanomas, cancer of Bartholin's gland, and vulvar intraepithelial neoplasia.

[0659] Disorders and/or diseases of the uterus that may be diagnosed, treated, and/or prevented with the compositions of the invention include, but are not limited to, dysmenorrhea, retroverted uterus, endometriosis, fibroids, adenomyosis, anovulatory bleeding, amenorrhea, Cushing's syndrome, hydatidiform moles, Asherman's syndrome, premature menopause, precocious puberty, uterine polyps, dysfunctional uterine bleeding (e.g., due to aberrant hormonal signals), and neoplastic disorders, such as adenocarcinomas, keiomyosarcomas, and sarcomas. Additionally, the polypeptides, polynucleotides, or agonists or antagonists of the invention may be useful as a marker or detector of, as well as in the diagnosis, treatment, and/or prevention of congenital uterine abnormalities, such as bicornuate uterus, septate uterus, simple unicornuate uterus, unicornuate uterus with a noncavitary rudimentary horn, unicornuate uterus with a non-communicating cavitary rudimentary horn, unicornuate uterus with a communicating cavitary horn, arcuate uterus, uterine didelfus, and T-shaped uterus.

[0660] Ovarian diseases and/or disorders that may be diagnosed, treated, and/or prevented with the compositions of the invention include, but are not limited to, anovulation, polycystic ovary syndrome (Stein-Leventhal syndrome), ovarian cysts, ovarian hypofunction, ovarian insensitivity to gonadotropins, ovarian overproduction of androgens, right ovarian vein syndrome, amenorrhea, hirutism, and ovarian cancer (including, but not limited to, primary and secondary cancerous growth, Sertoli-Leydig tumors, endometriod carcinoma of the ovary, ovarian papillary serous adenocarcinoma, ovarian mucinous adenocarcinoma, and Ovarian Krukenberg tumors).

[0661] Cervical diseases and/or disorders that may be diagnosed, treated, and/or prevented with the compositions of the invention include, but are not limited to, cervicitis, chronic cervicitis, mucopurulent cervicitis, cervical dysplasia, cervical polyps, Nabothian cysts, cervical erosion, cervical incompetence, and cervical neoplasms (including, for example, cervical carcinoma, squamous metaplasia, squamous cell carcinoma, adenosquamous cell neoplasia, and columnar cell neoplasia).

[0662] Additionally, diseases and/or disorders of the reproductive system that may be diagnosed, treated, and/or prevented with the compositions of the invention include, but are not limited to, disorders and/or diseases of pregnancy, including miscarriage and stillbirth, such as early abortion, late abortion, spontaneous abortion, induced abortion, therapeutic abortion, threatened abortion, missed abortion, incomplete abortion, complete abortion, habitual abortion, missed abortion, and septic abortion; ectopic pregnancy, anemia, Rh incompatibility, vaginal bleeding during pregnancy, gestational diabetes, intrauterine growth retardation, polyhydramnios, BELLP syndrome, abruptio placentae, placenta previa, hyperemesis, preeclampsia, eclampsia, herpes gestationis, and urticaria of pregnancy. Additionally, the polynucleotides, polypeptides, and agonists or antagonists of the present invention may be used in the diagnosis, treatment, and/or prevention of diseases that can complicate pregnancy, including heart disease, heart failure, rheumatic heart disease, congenital heart disease, mitral valve prolapse, high blood pressure, anemia, kidney disease, infectious disease (e.g., rubella, cytomegalovirus, toxoplasmosis, infectious hepatitis, chlamydia, HIV, AIDS, and genital herpes), diabetes mellitus, Graves' disease, thyroiditis, hypothyroidism, Hashimoto's thyroiditis, chronic active hepatitis, cirrhosis of the liver, primary biliary cirrhosis, asthma, systemic lupus eryematosis, rheumatoid arthritis, myasthenia gravis, idiopathic thrombocytopenic purpura, appendicitis, ovarian cysts, gallbladder disorders,and obstruction of the intestine.

[0663] Complications associated with labor and parturition that may be diagnosed, treated, and/or prevented with the compositions of the invention include, but are not limited to, premature rupture of the membranes, pre-term labor, post-term pregnancy, postmaturity, labor that progresses too slowly, fetal distress (e.g., abnormal heart rate (fetal or maternal), breathing problems, and abnormal fetal position), shoulder dystocia, prolapsed umbilical cord, amniotic fluid embolism, and aberrant uterine bleeding.

[0664] Further, diseases and/or disorders of the postdelivery period, that may be diagnosed, treated, and/or prevented with the compositions of the invention, include, but are not limited to, endometritis, myometritis, parametritis, peritonitis, pelvic thrombophlebitis, pulmonary embolism, endotoxemia, pyelonephritis, saphenous thrombophlebitis, mastitis, cystitis, postpartum hemorrhage, and inverted uterus.

[0665] Other disorders and/or diseases of the female reproductive system that may be diagnosed, treated, and/or prevented by the polynucleotides, polypeptides, and agonists or antagonists of the present invention include, but are not limited to, Turner's syndrome, pseudohermaphroditism, premenstrual syndrome, pelvic inflammatory disease, pelvic congestion (vascular engorgement), frigidity, anorgasmia, dyspareunia, ruptured fallopian tube, and Mittelschmerz. Developmental and Inherited Disorders

[0666] Polynuceotides or polypeptides, or agonists or antagonists of the present invention may be used to treat, prevent, diagnose, and/or prognose diseases associated with mixed fetal tissues, including, but not limited to, developmental and inherited disorders or defects of the nervous system, musculoskelelal system, execretory system, cardiovascular system, hematopoietic system, gastrointestinal system, reproductive system, and respiratory system. Compositions of the present invention may also be used to treat, prevent, diagnose, and/or prognose developmental and inherited disorders or defects associated with, but not limited to, skin, hair, visual, and auditory tissues, metabolism. Additionally, the compositions of the invention may be useful in the diagnosis, treatment, and/or prevention of disorders or diseases associated with, but not limited to, chromosomal or genetic abnormalities and hyperproliferation or neoplasia.

[0667] Disorders or defects of the nervous system associated with developmental or inherited abnormalities that may be diagnosed, treated, and/or prevented with the compostions of the invention include, but are not limited to, adrenoleukodystrophy, agenesis of corpus callosum, Alexander disease, anencephaly, Angelman syndrome, Arnold-Chiari deformity, Batten disease, Canavan disease, cephalic disorders, Charcot-Marie-Tooth disease, encephalocele, Friedreich's ataxia, Gaucher's disease, Gorlin syndrome, Hallervorden-Spatz disease, hereditary spastic paraplegia, Huntington disease, hydranencephaly, hydrocephalus, Joubert syndrome, Lesch-Nyhan syndrome, leukodystrophy, Menkes disease, microcephaly, Niemann-Pick Type Cl, neurofibromatosis, porencephaly, progeria, proteus syndrome, Refsum disease, spina bifida, Sturge-Weber syndrome, Tay-Sachs disease, tuberous sclerosis, and von Hippel-Lindau disease.

[0668] Developmental and inherited disorders resulting in disorders or defects of the musculoskeletal system that may be diagnosed, treated, and/or prevented with the compositions of the invention include, but are not limited to, achondroplasia, atlanto-occipital fusion, arthrogryposis mulitplex congenita, autosomal recessive muscular dystrophy, Becker's muscular dystrophy, cerebral palsy, choanal atresia, cleft lip, cleft palate, clubfoot, congenital amputation, congenital dislocation of the hip, congenital torticollis, congenital scoliosis, dopa-repsonsive dystonia, Duchenne muscular dystrophy, early-onset generalized dystonia, femoral torsion, Gorlin syndrome, hypophosphatasia, Klippel-Feil syndrome, knee dislocation, myoclonic dystonia, myotonic dystrophy, nail-patella syndrome, osteogenesis imperfecta, paroxysmal dystonia, progeria, prune-belly syndrome, rapid-onset dystonia parkinsonism, scolosis, syndactyly, Treacher Collins' syndrome, velocardiofacial syndrome, and X-linked dystonia-parkinsonism.

[0669] Developmental or hereditary disorders or defects of the excretory system that may be diagnosed, treated, and/or prevented with the compositions of the invention include, but are not limited to, Alport's syndrome, Bartter's syndrome, bladder diverticula, bladder exstrophy, cystinuria, epispadias, Fanconi's syndrome, Hartnup disease, horseshoe kidney, hypospadias, kidney agenesis, kidney ectopia, kidney malrotation, Liddle's syndrome, medullary cystic disease, medullary sponge, multicystic kidney, kidney polycystic kidney disease, nail-patella syndrome, Potter's syndrome, urinary tract flow obstruction, vitamin D-resistant rickets, and Wilm's tumor.

[0670] Cardiovascular disorders or defects of developmental or hereditary origin that may be diagnosed, treated, and/or prevented with the compositions of the inventtion include, but are not limited to, aortic valve stenosis, atrial septal defects, artioventricular (A-V) canal defect, bicuspid aortic valve, coarctation or the aorta, dextrocardia, Ebstein's anomaly, Eisenmenger's complex, hypoplastic left heart syndrome, Marfan syndrome, patent ductus arteriosus, progeria, pulmonary atresia, pulmonary valve stenosis, subaortic stenosis, tetralogy of fallot, total anomalous pulmonary venous (P-V) connection, transposition of the great arteries, tricuspid atresia, truncus arteriosus, ventricular septal defects. Developmental or inherited disorders resulting in disorders involving the hematopoietic system that may be diagnosed, treated, and/or prevented with the compositions of the invention include, but not limited to, Bernard-Soulier syndrome, Chediak-Higashi syndrome, hemophilia, Hermansky-Pudlak syndrome, sickle cell anemia, storage pool disease, thromboxane A2 dysfunction, thrombasthenia, and von Willebrand's disease.

[0671] The compositions of the invention may also be used to diagnose, treat, and/or prevent developmental and inherited disorders resulting in disorders or defects of the gastrointestinal system, including, but not limited to, anal atresia, biliary atresia, esophageal atresia, diaphragmatic hernia, Hirschsprung's disease, Meckel's diverticulum, oligohydramnios, omphalocele, polyhydramnios, porphyria, situs inversus viscera. Developmental or inherited disorders resulting in metabolic disorders that may be diagnosed, treated, and/or prevented with the compositions of the invention include, but are not limited to, alpha-i antitrypsin deficiency, cystic fibrosis, hemochromatosis, lysosomal storage disease, phenylketonuria, Wilson's disease, and Zellweger syndrome.

[0672] Disorders of the reproductive system that are developmentally or hereditary related that may also be diagnosed, treated, and/or prevented with the compositions of the invention include, but are not limited to, androgen insensitivity syndrome, ambiguous genitalia, autosomal sex reversal, congenital adreneal hyperplasia, gonadoblastoma, ovarian germ cell cancer, pseudohermphroditism, true hermaphroditism, undescended testis, XX male syndrome, and XY female type gonadal dysgenesis. The compositions of the invention may also be used to diagnose, treat, and/or prevent developmental or inherited respiratory defects including, but not limited to, askin tumor, azygos lobe, congenital diaphragmatic hernia, congenital lobar emphysema, cystic adenomatoid malformation, lobar emphysema, hyaline membrane disease, and pectus excavatum.

[0673] Developmental or inherited disorders may also result from chromosomal or genetic aberration that may be diagnosed, treated, and/or prevented with the compositions of the invention including, but not limited to, 4p- syndrome, cri du chat syndrome, Digeorge syndrome, Down's syndrome, Edward's syndrome, fragile X syndrome, Klinefelter's syndrome, Patau's syndrome, Prader-Willi syndrome, progeria, Turner's syndrome, triple X syndrome, and XYY syndrome. Other developmental disorders that can be diagnosed, treated, and/or prevented with the compositions of the invention, include, but are not limited to, fetal alcohol syndrome, and can be caused by environmental factors surrounding the developing fetus.

[0674] The compositions of the invention may further be able to be used to diagnose, treat, and/or prevent errors in development or a genetic disposition that may result in hyperproliferative disorders or neoplasms, including, but not limited to, acute childhood lymphoblastic leukemia, askin tumor, Beckwith-Wiedemann syndrome, childhood acute myeloid leukemia, childhood brain stem glioma, childhood cerebellar astrocytoma, childhood extracranial germ cell tumors childhood (primary), gonadoblastoma, hepatocellular cancer, childhood Hodgkin's disease, childhood Hodgkin's lymphoma, childhood hypothalamic and visual pathway glioma, childhood (primary) liver cancer, childhood lymphoblastic leukemia, childhood medulloblastoma, childhood non-Hodgkin's lymphoma, childhood pineal and supratentorial primitive neuroectodermal tumors, childhood primary liver cancer, childhood rhabdomyosarcoma, childhood soft tissue sarcoma, Gorlin syndrome, familial multiple endrocrine neoplasia type I, neuroblastoma, ovarian germ cell cancer, pheochromocytoma, retinoblastoma, and Wilm's tumor.

[0675] Polypeptides may be administered using any method known in the art, including, but not limited to, direct needle injection at the delivery site, intravenous injection, topical administration, catheter infusion, biolistic injectors, particle accelerators, gelfoam sponge depots, other commercially available depot materials, osmotic pumps, oral or suppositorial solid pharmaceutical formulations, decanting or topical applications during surgery, aerosol delivery. Such methods are known in the art. Polypeptides may be administered as part of a Therapeutic, described in more detail below. Methods of delivering polynucleotides are described in more detail herein. Diseases at the Cellular Level

[0676] Diseases associated with increased cell survival or the inhibition of apoptosis that could be treated, prevented, diagnosed and/or prognosed using polynucleotides or polypeptides, as well as antagonists or agonists of the present invention, include cancers (such as follicular lymphomas, carcinomas with p53 mutations, and hormone-dependent tumors, including, but not limited to colon cancer, cardiac tumors, pancreatic cancer, melanoma, retinoblastoma, glioblastoma, lung cancer, intestinal cancer, testicular cancer, stomach cancer, neuroblastoma, myxoma, myoma, lymphoma, endothelioma, osteoblastoma, osteoclastoma, osteosarcoma, chondrosarcoma, adenoma, breast cancer, prostate cancer, Kaposi's sarcoma and ovarian cancer); autoimmune disorders (such as, multiple sclerosis, Sjogren's syndrome, Hashimoto's thyroiditis, biliary cirrhosis, Behcet's disease, Crohn's disease, polymyositis, systemic lupus erythematosus and immune-related glomerulonephritis and rheumatoid arthritis) and viral infections (such as herpes viruses, pox viruses and adenoviruses), inflammation, graft v. host disease, acute graft rejection, and chronic graft rejection.

[0677] In preferred embodiments, polynucleotides, polypeptides, and/or antagonists of the invention are used to inhibit growth, progression, and/or metastasis of cancers, in particular those [listed above] involving lung tissues.

[0678] Additional diseases or conditions associated with increased cell survival that could be treated or detected by polynucleotides or polypeptides, or agonists or antagonists of the present invention include, but are not limited to, progression, and/or metastases of malignancies and related disorders such as leukemia (including acute leukemias (e.g., acute lymphocytic leukemia, acute myelocytic leukemia (including myeloblastic, promyelocytic, myelomonocytic, monocytic, and erythroleukemia)) and chronic leukemias (e.g., chronic myelocytic (granulocytic) leukemia and chronic lymphocytic leukemia)), polycythemia vera, lymphomas (e.g., Hodgkin's disease and non-Hodgkin's disease), multiple myeloma, Waldenstrom's macroglobulinemia, heavy chain disease, and solid tumors including, but not limited to, sarcomas and carcinomas such as fibrosarcoma, myxosarcoma, liposarcoma, chondrosarcoma, osteogenic sarcoma, chordoma, angiosarcoma, endotheliosarcoma, lymphangiosarcoma, lymphangioendotheliosarcoma, synovioma, mesothelioma, Ewing's tumor, leiomyosarcoma, rhabdomyosarcoma, colon carcinoma, pancreatic cancer, breast cancer, ovarian cancer, prostate cancer, squamous cell carcinoma, basal cell carcinoma, adenocarcinoma, sweat gland carcinoma, sebaceous gland carcinoma, papillary carcinoma, papillary adenocarcinomas, cystadenocarcinoma, medullary carcinoma, bronchogenic carcinoma, renal cell carcinoma, hepatoma, bile duct carcinoma, choriocarcinoma, seminoma, embryonal carcinoma, Wilm's tumor, cervical cancer, testicular tumor, lung carcinoma, small cell lung carcinoma, bladder carcinoma, epithelial carcinoma, glioma, astrocytoma, medulloblastoma, craniopharyngioma, ependymoma, pinealoma, hemangioblastoma, acoustic neuroma, oligodendroglioma, menangioma, melanoma, neuroblastoma, and retinoblastoma.

[0679] Diseases associated with increased apoptosis that could be treated, prevented, diagnosted, and/or prognosed using polynucleotides or polypeptides, as well as agonists or antagonists of the present invention, include, but are not limited to, AIDS; neurodegenerative disorders (such as Alzheimer's disease, Parkinson's disease, Amyotrophic lateral sclerosis, Retinitis pigmentosa, Cerebellar degeneration and brain tumor or prior associated disease); autoimmune disorders (such as, multiple sclerosis, Sjogren's syndrome, Hashimoto's thyroiditis, biliary cirrhosis, Behcet's disease, Crohn's disease, polymyositis, systemic lupus erythematosus and immune-related glomerulonephritis and rheumatoid arthritis) myelodysplastic syndromes (such as aplastic anemia), graft v. host disease, ischemic injury (such as that caused by myocardial infarction, stroke and reperfusion injury), liver injury (e.g., hepatitis related liver injury, ischemia/reperfusion injury, cholestosis (bile duct injury) and liver cancer); toxin-induced liver disease (such as that caused by alcohol), septic shock, cachexia and anorexia. Wound Healing and Epithelial Cell Proliferation

[0680] In accordance with yet a further aspect of the present invention, there is provided a process for utilizing polynucleotides or polypeptides, as well as agonists or antagonists of the present invention, for therapeutic purposes, for example, to stimulate epithelial cell proliferation and basal keratinocytes for the purpose of wound healing, and to stimulate hair follicle production and healing of dermal wounds. Polynucleotides or polypeptides, as well as agonists or antagonists of the present invention, may be clinically useful in stimulating wound healing including surgical wounds, excisional wounds, deep wounds involving damage of the dermis and epidermis, eye tissue wounds, dental tissue wounds, oral cavity wounds, diabetic ulcers, dermal ulcers, cubitus ulcers, arterial ulcers, venous stasis ulcers, bums resulting from heat exposure or chemicals, and other abnormal wound healing conditions such as uremia, malnutrition, vitamin deficiencies and complications associated with systemic treatment with steroids, radiation therapy and antineoplastic drugs and antimetabolites. Polynucleotides or polypeptides, as well as agonists or antagonists of the present invention, could be used to promote dermal reestablishment subsequent to dermal loss.

[0681] Polynucleotides or polypeptides, as well as agonists or antagonists of the present invention, could be used to increase the adherence of skin grafts to a wound bed and to stimulate re-epithelialization from the wound bed. The following are types of grafts that polynucleotides or polypeptides, agonists or antagonists of the present invention, could be used to increase adherence to a wound bed: autografts, artificial skin, allografts, autodermic graft, autoepdermic grafts, avacular grafts, Blair-Brown grafts, bone graft, brephoplastic grafts, cutis graft, delayed graft, dermic graft, epidermic graft, fascia graft, full thickness graft, heterologous graft, xenograft, homologous graft, hyperplastic graft, lamellar graft, mesh graft, mucosal graft, Ollier-Thiersch graft, omenpal graft, patch graft, pedicle graft, penetrating graft, split skin graft, thick split graft. Polynucleotides or polypeptides, as well as agonists or antagonists of the present invention, can be used to promote skin strength and to improve the appearance of aged skin.

[0682] It is believed that polynucleotides or polypeptides, as well as agonists or antagonists of the present invention, will also produce changes in hepatocyte proliferation, and epithelial cell proliferation in the lung, breast, pancreas, stomach, small intestine, and large intestine. Polynucleotides or polypeptides, as well as agonists or antagonists of the present invention, could promote proliferation of epithelial cells such as sebocytes, hair follicles, hepatocytes, type II pneumocytes, mucin-producing goblet cells, and other epithelial cells and their progenitors contained within the skin, lung, liver, and gastrointestinal tract. Polynucleotides or polypeptides, agonists or antagonists of the present invention, may promote proliferation of endothelial cells, keratinocytes, and basal keratinocytes.

[0683] Polynucleotides or polypeptides, as well as agonists or antagonists of the present invention, could also be used to reduce the side effects of gut toxicity that result from radiation, chemotherapy treatments or viral infections. Polynucleotides or polypeptides, as well as agonists or antagonists of the present invention, may have a cytoprotective effect on the small intestine mucosa. Polynucleotides or polypeptides, as well as agonists or antagonists of the present invention, may also stimulate healing of mucositis (mouth ulcers) that result from chemotherapy and viral infections.

[0684] Polynucleotides or polypeptides, as well as agonists or antagonists of the present invention, could further be used in full regeneration of skin in full and partial thickness skin defects, including burns, (i.e., repopulation of hair follicles, sweat glands, and sebaceous glands), treatment of other skin defects such as psoriasis. Polynucleotides or polypeptides, as well as agonists or antagonists of the present invention, could be used to treat epidermolysis bullosa, a defect in adherence of the epidermis to the underlying dermis which results in frequent, open and painful blisters by accelerating reepithelialization of these lesions. Polynucleotides or polypeptides, as well as agonists or antagonists of the present invention, could also be used to treat gastric and doudenal ulcers and help heal by scar formation of the mucosal lining and regeneration of glandular mucosa and duodenal mucosal lining more rapidly. Inflammatory bowel diseases, such as Crohn's disease and ulcerative colitis, are diseases, which result in destruction of the mucosal surface of the small or large intestine, respectively. Thus, polynucleotides or polypeptides, as well as agonists or antagonists of the present invention, could be used to promote the resurfacing of the mucosal surface to aid more rapid healing and to prevent progression of inflammatory bowel disease. Treatment with polynucleotides or polypeptides, agonists or antagonists of the present invention, is expected to have a significant effect on the production of mucus throughout the gastrointestinal tract and could be used to protect the intestinal mucosa from injurious substances that are ingested or following surgery. Polynucleotides or polypeptides, as well as agonists or antagonists of the present invention, could be used to treat diseases associate with the under expression.

[0685] Moreover, polynucleotides or polypeptides, as well as agonists or antagonists of the present invention, could be used to prevent and heal damage to the lungs due to various pathological states. Polynucleotides or polypeptides, as well as agonists or antagonists of the present invention, could stimulate proliferation and differentiation and promote the repair of alveoli and brochiolar epithelium to prevent or treat acute or chronic lung damage. For example, emphysema, which results in the progressive loss of aveoli, and inhalation injuries, i.e., resulting from smoke inhalation and bums, that cause necrosis of the bronchiolar epithelium and alveoli could be effectively treated using polynucleotides or polypeptides, agonists or antagonists of the present invention. Also, polynucleotides or polypeptides, as well as agonists or antagonists of the present invention, could be used to stimulate the proliferation of and differentiation of type II pneumocytes, which may help treat or prevent disease such as hyaline membrane diseases, such as infant respiratory distress syndrome and bronchopulmonary displasia, in premature infants.

[0686] Polynucleotides or polypeptides, as well as agonists or antagonists of the present invention, could stimulate the proliferation and differentiation of hepatocytes and, thus, could be used to alleviate or treat liver diseases and pathologies such as fulminant liver failure caused by cirrhosis, liver damage caused by viral hepatitis and toxic substances (i.e., acetaminophen, carbon tetraholoride and other hepatotoxins known in the art).

[0687] In addition, polynucleotides or polypeptides, as well as agonists or antagonists of the present invention, could be used treat or prevent the onset of diabetes mellitus. In patients with newly diagnosed Types I and II diabetes, where some islet cell function remains, polynucleotides or polypeptides, as well as agonists or antagonists of the present invention, could be used to maintain the islet function so as to alleviate, delay or prevent permanent manifestation of the disease. Also, polynucleotides or polypeptides, as well as agonists or antagonists of the present invention, could be used as an auxiliary in islet cell transplantation to improve or promote islet cell function. Infectious Disease

[0688] Polynucleotides or polypeptides, as well as agonists or antagonists of the present invention can be used to treat or detect infectious agents. For example, by increasing the immune response, particularly increasing the proliferation and differentiation of B and/or T cells, infectious diseases may be treated. The immune response may be increased by either enhancing an existing immune response, or by initiating a new immune response. Alternatively, polynucleotides or polypeptides, as well as agonists or antagonists of the present invention may also directly inhibit the infectious agent, without necessarily eliciting an immune response.

[0689] Viruses are one example of an infectious agent that can cause disease or symptoms that can be treated or detected by a polynucleotide or polypeptide and/or agonist or antagonist of the present invention. Examples of viruses, include, but are not limited to Examples of viruses, include, but are not limited to the following DNA and RNA viruses and viral families: Arbovirus, Adenoviridae, Arenaviridae, Arterivirus, Birnaviridae, Bunyaviridae, Caliciviridae, Circoviridae, Coronaviridae, Dengue, EBV, HIV, Flaviviridae, Hepadnaviridae (Hepatitis), Herpesviridae (such as, Cytomegalovirus, Herpes Simplex, Herpes Zoster), Mononegavirus (e.g., Paramyxoviridae, Morbillivirus, Rhabdoviridae), Orthomyxoviridae (e.g., Influenza A, Influenza B, and parainfluenza), Papiloma virus, Papovaviridae, Parvoviridae, Picornaviridae, Poxyiridae (such as Smallpox or Vaccinia), Reoviridae (e.g., Rotavirus), Retroviridae (HTLV-I, HTLV-II, Lentivirus), and Togaviridae (e.g., Rubivirus). Viruses falling within these families can cause a variety of diseases or symptoms, including, but not limited to: arthritis, bronchiollitis, respiratory syncytial virus, encephalitis, eye infections (e.g., conjunctivitis, keratitis), chronic fatigue syndrome, hepatitis (A, B, C, E, Chronic Active, Delta), Japanese B encephalitis, Junin, Chikungunya, Rift Valley fever, yellow fever, meningitis, opportunistic infections (e.g., AIDS), pneumonia, Burkitt's Lymphoma, chickenpox, hemorrhagic fever, Measles, Mumps, Parainfluenza, Rabies, the common cold, Polio, leukemia, Rubella, sexually transmitted diseases, skin diseases (e.g., Kaposi's, warts), and viremia. polynucleotides or polypeptides, or agonists or antagonists of the invention, can be used to treat or detect any of these symptoms or diseases. In specific embodiments, polynucleotides, polypeptides, or agonists or antagonists of the invention are used to treat: meningitis, Dengue, EBV, and/or hepatitis (e.g., hepatitis B). In an additional specific embodiment polynucleotides, polypeptides, or agonists or antagonists of the invention are used to treat patients nonresponsive to one or more other commercially available hepatitis vaccines. In a further specific embodiment polynucleotides, polypeptides, or agonists or antagonists of the invention are used to treat AIDS.

[0690] Similarly, bacterial or fungal agents that can cause disease or symptoms and that can be treated or detected by a polynucleotide or polypeptide and/or agonist or antagonist of the present invention include, but are not limited to, the following Gram-Negative and Gram-positive bacteria, bacterial families, and fungi: Actinomyces (e.g., Norcardia), Acinetobacter, Cryptococcus neoformans, Aspergillus, Bacillaceae (e.g., Bacillus anthrasis), Bacteroides (e.g., Bacteroides fragilis), Blastomycosis, Bordetella, Borrelia (e.g., Borrelia burgdorferi), Brucella, Candidia, Campylobacter, Chlamydia, Clostridium (e.g., Clostridium botulinum, Clostridium dificile, Clostridium perfringens, Clostridium tetani), Coccidioides, Corynebacterium (e.g., Corynebacterium diptheriae), Cryptococcus, Dermatocycoses, E. coli (e.g., Enterotoxigenic E. coli and Enterohemorrhagic E. coli), Enterobacter (e.g. Enterobacter aerogenes), Enterobacteriaceae (Klebsiella, Salmonella (e.g., Salmonella typhi, Salmonella enteritidis, Salmonella paratyphi), Serratia, Yersinia, Shigella), Erysipelothrix, Haemophilus (e.g., Haemophilus influenza type B), Helicobacter, Legionella (e.g., Legionella pneumophila), Leptospira, Listeria (e.g., Listeria monocytogenes), Mycoplasma, Mycobacterium (e.g., Mycobacterium leprae and Mycobacterium tuberculosis), Vibrio (e.g.,Vibrio cholerae), Neisseriaceae (e.g., Neisseria gonorrhea, Neisseria meningitidis), Pasteurellacea, Proteus, Pseudomonas (e.g., Psuedomonas aeruginosa), Rickettsiaceae, Spirochetes (e.g., Treponema spp., Leptospira spp., Borrelia spp.) Shigella spp., Staphylococcus (e.g., Staphylococcus aureus), Meningiococcus, Pneumococcus and Streptococcus (e.g., Streptococcus pneumoniae and Groups A,B, and C Streptococci), and Ureaplasmas. These bacterial, parasitic, and fungal families can cause diseases or symptoms, including, but not limited to: antibiotic-resistant infections, bacteremia, endocarditis, septicemia, eye infections (conjunctivitis) tuberculosis, uveitis, gingivitis, bacterial diarrhea, opportunistic infections (e.g., AIDS related infections), paronychia, prosthesis-related infections, dental caries, Reiter's Disease, respiratory tract infections (e.g., Whooping Cough or Empyema), sepsis, Lyme Disease, Cat-Scratch Disease, dysentery, paratyphoid fever, food poisoning, Legionella disease, chronic and acute inflammation, erythema, yeast infections, typhoid, pneumonia, gonorrhea, meningitis (e.g., meningitis types A and B), chlamydia, syphilis, diphtheria, leprosy, burcellosis, peptic ulcers, anthrax, spontaneous abortion, birth defects, lung infections, ear infections, deafness, blindness, lethargy, malaise, vomiting, chronic diarrhea, Crohn's disease, colitis, vaginosis, sterility, pelvic inflammatory disease, candidiasis, paratuberculosis, tuberculosis, lupus, botulism, gangrene, tetanus, impetigo, Rheumatic Fever, Scarlet Fever, sexually transmitted diseases, skin diseases (e.g., cellulitis, dermatocycoses), toxemia, urinary tract infections, wound infections or noscomial infections. Polynucleotides or polypeptides, agonists or antagonists of the invention, can be used to treat or detect any of these symptoms or diseases. In specific embodiments, polynucleotides, polypeptides, agonists or antagonists of the invention are used to treat: tetanus, diptheria, botulism, and/or meningitis type B.

[0691] Moreover, parasitic agents causing disease or symptoms that can be treated or detected by a polynucleotide or polypeptide and/or agonist or antagonist of the present invention include, but not limited to, the following families or class: Amebiasis, Babesiosis, Coccidiosis, Cryptosporidiosis, Dientamoebiasis, Dourine, Ectoparasitic, Giardiasis, Helminthiasis, Leishmaniasis, Theileriasis, Toxoplasmosis, Trypanosomiasis, and Trichomonas and Sporozoans (e.g., Plasmodium virax, Plasmodium falciparium, Plasmodium malariae and Plasmodium ovale). These parasites can cause a variety of diseases or symptoms, including, but not limited to: Scabies, Trombiculiasis, eye infections, intestinal disease (e.g., dysentery, giardiasis), liver disease, lung disease, opportunistic infections (e.g., AIDS related), malaria, pregnancy complications, and toxoplasmosis. polynucleotides or polypeptides, or agonists or antagonists of the invention, can be used to treat or detect any of these symptoms or diseases.

[0692] Polynucleotides or polypeptides, as well as agonists or antagonists of the present invention of the present invention could either be by administering an effective amount of a polypeptide to the patient, or by removing cells from the patient, supplying the cells with a polynucleotide of the present invention, and returning the engineered cells to the patient (ex vivo therapy). Moreover, the polypeptide or polynucleotide of the present invention can be used as an antigen in a vaccine to raise an immune response against infectious disease. Regeneration

[0693] Polynucleotides or polypeptides, as well as agonists or antagonists of the present invention can be used to differentiate, proliferate, and attract cells, leading to the regeneration of tissues. (See, Science 276:59-87 (1997).) The regeneration of tissues could be used to repair, replace, or protect tissue damaged by congenital defects, trauma (wounds, burns, incisions, or ulcers), age, disease (e.g. osteoporosis, osteocarthritis, periodontal disease, liver failure), surgery, including cosmetic plastic surgery, fibrosis, reperfusion injury, or systemic cytokine damage.

[0694] Tissues that could be regenerated using the present invention include organs (e.g., pancreas, liver, intestine, kidney, skin, endothelium), muscle (smooth, skeletal or cardiac), vasculature (including vascular and lymphatics), nervous, hematopoietic, and skeletal (bone, cartilage, tendon, and ligament) tissue. Preferably, regeneration occurs without or decreased scarring. Regeneration also may include angiogenesis.

[0695] Moreover, polynucleotides or polypeptides, as well as agonists or antagonists of the present invention, may increase regeneration of tissues difficult to heal. For example, increased tendon/ligament regeneration would quicken recovery time after damage. Polynucleotides or polypeptides, as well as agonists or antagonists of the present invention could also be used prophylactically in an effort to avoid damage. Specific diseases that could be treated include of tendinitis, carpal tunnel syndrome, and other tendon or ligament defects. A further example of tissue regeneration of non-healing wounds includes pressure ulcers, ulcers associatedwith vascular insufficiency, surgical, and traumatic wounds.

[0696] Similarly, nerve and brain tissue could also be regenerated by using polynucleotides or polypeptides, as well as agonists or antagonists of the present invention, to proliferate and differentiate nerve cells. Diseases that could be treated using this method include central and peripheral nervous system diseases, neuropathies, or mechanical and traumatic disorders (e.g., spinal cord disorders, head trauma, cerebrovascular disease, and stoke). Specifically, diseases associated with peripheral nerve injuries, peripheral neuropathy (e.g., resulting from chemotherapy or other medical therapies), localized neuropathies, and central nervous system diseases (e.g., Alzheimer's disease, Parkinson's disease, Huntington's disease, amyotrophic lateral sclerosis, and Shy-Drager syndrome), could all be treated using the polynucleotides or polypeptides, as well as agonists or antagonists of the present invention. Chemotaxis

[0697] Polynucleotides or polypeptides, as well as agonists or antagonists of the present invention may have chemotaxis activity. A chemotaxic molecule attracts or mobilizes cells (e.g., monocytes, fibroblasts, neutrophils, T-cells, mast cells, eosinophils, epithelial and/or endothelial cells) to a particular site in the body, such as inflarnmation, infection, or site of hyperproliferation. The mobilized cells can then fight off and/or heal the particular trauma or abnormality.

[0698] Polynucleotides or polypeptides, as well as agonists or antagonists of the present invention may increase chemotaxic activity of particular cells. These chemotactic molecules can then be used to treat inflammation, infection, hyperproliferative disorders, or any immune system disorder by increasing the number of cells targeted to a particular location in the body. For example, chemotaxic molecules can be used to treat wounds and other trauma to tissues by attracting immune cells to the injured location. Chemotactic molecules of the present invention can also attract fibroblasts, which can be used to treat wounds.

[0699] It is also contemplated that polynucleotides or polypeptides, as well as agonists or antagonists of the present invention may inhibit chemotactic activity. These molecules could also be used to treat disorders. Thus, polynucleotides or polypeptides, as well as agonists or antagonists of the present invention could be used as an inhibitor of chemotaxis.

[0700] Binding Activity

[0701] A polypeptide of the present invention may be used to screen for molecules that bind to the polypeptide or for molecules to which the polypeptide binds. The binding of the polypeptide and the molecule may activate (agonist), increase, inhibit (antagonist), or decrease activity of the polypeptide or the molecule bound. Examples of such molecules include antibodies, oligonucleotides, proteins (e.g., receptors),or small molecules.

[0702] Preferably, the molecule is closely related to the natural ligand of the polypeptide, e.g., a fragment of the ligand, or a natural substrate, a ligand, a structural or functional mimetic. (See, Coligan et al., Current Protocols in Immunology 1(2):Chapter 5 (1991).) Similarly, the molecule can be closely related to the natural receptor to which the polypeptide binds, or at least, a fragment of the receptor capable of being bound by the polypeptide (e.g., active site). In either case, the molecule can be rationally designed using known techniques.

[0703] Preferably, the screening for these molecules involves producing appropriate cells which express the polypeptide. Preferred cells include cells from mammals, yeast, Drosophila, or E. coli. Cells expressing the polypeptide (or cell membrane containing the expressed polypeptide) are then preferably contacted with a test compound potentially containing the molecule to observe binding, stimulation, or inhibition of activity of either the polypeptide or the molecule.

[0704] The assay may simply test binding of a candidate compound to the polypeptide, wherein binding is detected by a label, or in an assay involving competition with a labeled competitor. Further, the assay may test whether the candidate compound results in a signal generated by binding to the polypeptide.

[0705] Alternatively, the assay can be carried out using cell-free preparations, polypeptide/molecule affixed to a solid support, chemical libraries, or natural product mixtures. The assay may also simply comprise the steps of mixing a candidate compound with a solution containing a polypeptide, measuring polypeptide/molecule activity or binding, and comparing the polypeptide/molecule activity or binding to a standard.

[0706] Preferably, an ELISA assay can measure polypeptide level or activity in a sample (e.g., biological sample) using a monoclonal or polyclonal antibody. The antibody can measure polypeptide level or activity by either binding, directly or indirectly, to the polypeptide or by competing with the polypeptide for a substrate.

[0707] Additionally, the receptor to which the polypeptide of the present invention binds can be identified by numerous methods known to those of skill in the art, for example, ligand panning and FACS sorting (Coligan, et al., Current Protocols in Immun., 1(2), Chapter 5, (1991)). For example, expression cloning is employed wherein polyadenylated RNA is prepared from a cell responsive to the polypeptides, for example, NIH3T3 cells which are known to contain multiple receptors for the FGF family proteins, and SC-3 cells, and a cDNA library created from this RNA is divided into pools and used to transfect COS cells or other cells that are not responsive to the polypeptides. Transfected cells which are grown on glass slides are exposed to the polypeptide of the present invention, after they have been labelled. The polypeptides can be labeled by a variety of means including iodination or inclusion of a recognition site for a site-specific protein kinase.

[0708] Following fixation and incubation, the slides are subjected to auto-radiographic analysis. Positive pools are identified and sub-pools are prepared and re-transfected using an iterative sub-pooling and re-screening process, eventually yielding a single clones that encodes the putative receptor.

[0709] As an alternative approach for receptor identification, the labeled polypeptides can be photoaffinity linked with cell membrane or extract preparations that express the receptor molecule. Cross-linked material is resolved by PAGE analysis and exposed to X-ray film. The labeled complex containing the receptors of the polypeptides can be excised, resolved into peptide fragments, and subjected to protein microsequencing. The amino acid sequence obtained from microsequencing would be used to design a set of degenerate oligonucleotide probes to screen a cDNA library to identify the genes encoding the putative receptors.

[0710] Moreover, the techniques of gene-shuffling, motif-shuffling, exon-shuffling, and/or codon-shuffling (collectively referred to as “DNA shuffling”) may be employed to modulate the activities of the polypeptide of the present invention thereby effectively generating agonists and antagonists of the polypeptide of the present invention. See generally, U.S. Pat. Nos. 5,605,793, 5,811,238, 5,830,721, 5,834,252, and 5,837,458, and Patten, P. A., et al., Curr. Opinion Biotechnol. 8:724-33 (1997); Harayama, S. Trends Biotechnol. 16(2):76-82 (1998); Hansson, L. O., et al., J. Mol. Biol. 287:265-76 (1999); and Lorenzo, M. M. and Blasco, R. Biotechniques 24(2):308-13 (1998) (each of these patents and publications are hereby incorporated by reference). In one embodiment, alteration of polynucleotides and corresponding polypeptides may be achieved by DNA shuffling. DNA shuffling involves the assembly of two or more DNA segments into a desired molecule by homologous, or site-specific, recombination. In another embodiment, polynucleotides and corresponding polypeptides may be alterred by being subjected to random mutagenesis by error-prone PCR, random nucleotide insertion or other methods prior to recombination. In another embodiment, one or more components, motifs, sections, parts, domains, fragments, etc., of the polypeptide of the present invention may be recombined with one or more components, motifs, sections, parts, domains, fragments, etc. of one or more heterologous molecules. In preferred embodiments, the heterologous molecules are family members. In further preferred embodiments, the heterologous molecule is a growth factor such as, for example, platelet-derived growth factor (PDGF), insulin-like growth factor (IGF-I), transforming growth factor (TGF)-alpha, epidermal growth factor (EGF), fibroblast growth factor (FGF), TGF-beta, bone morphogenetic protein (BMP)-2, BMP-4, BMP-5, BMP-6, BMP-7, activins A and B, decapentaplegidpp), 60A, OP-2, dorsalin, growth differentiation factors (GDFs), nodal, MIS, inhibin-alpha, TGF-beta1, TGF-beta2, TGF-beta3, TGF-beta-5, and glial-derived neurotrophic factor (GDNF).

[0711] Other preferred fragments are biologically active fragments of the polypeptide of the present invention. Biologically active fragments are those exhibiting activity similar, but not necessarily identical, to an activity of the polypeptide of the present invention. The biological activity of the fragments may include an improved desired activity, or a decreased undesirable activity.

[0712] Additionally, this invention provides a method of screening compounds to identify those which modulate the action of the polypeptide of the present invention. An example of such an assay comprises combining a mammalian fibroblast cell, a the polypeptide of the present invention, the compound to be screened and ³[H] thymidine under cell culture conditions where the fibroblast cell would normally proliferate. A control assay may be performed in the absence of the compound to be screened and compared to the amount of fibroblast proliferation in the presence of the compound to determine if the compound stimulates proliferation by determining the uptake of ³[H] thymidine in each case. The amount of fibroblast cell proliferation is measured by liquid scintillation chromatography which measures the incorporation of ³[H] thymidine. Both agonist and antagonist compounds may be identified by this procedure.

[0713] In another method, a mammalian cell or membrane preparation expressing a receptor for a polypeptide of the present invention is incubated with a labeled polypeptide of the present invention in the presence of the compound. The ability of the compound to enhance or block this interaction could then be measured. Alternatively, the response of a known second messenger system following interaction of a compound to be screened and the receptor is measured and the ability of the compound to bind to the receptor and elicit a second messenger response is measured to determine if the compound is a potential agonist or antagonist. Such second messenger systems include but are not limited to, cAMP guanylate cyclase, ion channels or phosphoinositide hydrolysis.

[0714] All of these above assays can be used as diagnostic or prognostic markers. The molecules discovered using these assays can be used to treat disease or to bring about a particular result in a patient (e.g., blood vessel growth) by activating or inhibiting the polypeptide/molecule. Moreover, the assays can discover agents which may inhibit or enhance the production of the polypeptides of the invention from suitably manipulated cells or tissues.

[0715] Therefore, the invention includes a method of identifying compounds which bind to a polypeptide of the invention comprising the steps of: (a) incubating a candidate binding compound with a polypeptide of the present invention; and (b) determining if binding has occurred. Moreover, the invention includes a method of identifying agonists/antagonists comprising the steps of: (a) incubating a candidate compound with a polypeptide of the present invention, (b) assaying a biological activity, and (b) determining if a biological activity of the polypeptide has been altered.

[0716] Targeted Delivery

[0717] In another embodiment, the invention provides a method of delivering compositions to targeted cells expressing a receptor for a polypeptide of the invention, or cells expressing a cell bound form of a polypeptide of the invention.

[0718] As discussed herein, polypeptides or antibodies of the invention may be associated with heterologous polypeptides, heterologous nucleic acids, toxins, or prodrugs via hydrophobic, hydrophilic, ionic and/or covalent interactions. In one embodiment, the invention provides a method for the specific delivery of compositions of the invention to cells by administering polypeptides of the invention (including antibodies) that are associated with heterologous polypeptides or nucleic acids. In one example, the invention provides a method for delivering a therapeutic protein into the targeted cell. In another example, the invention provides a method for delivering a single stranded nucleic acid (e.g., antisense or ribozymes) or double stranded nucleic acid (e.g., DNA that can integrate into the cell's genome or replicate episomally and that can be transcribed) into the targeted cell.

[0719] In another embodiment, the invention provides a method for the specific destruction of cells (e.g., the destruction of tumor cells) by administering polypeptides of the invention (e.g., polypeptides of the invention or antibodies of the invention) in association with toxins or cytotoxic prodrugs.

[0720] By “toxin” is meant compounds that bind and activate endogenous cytotoxic effector systems, radioisotopes, holotoxins, modified toxins, catalytic subunits of toxins, or any molecules or enzymes not normally present in or on the surface of a cell that under defined conditions cause the cell's death. Toxins that may be used according to the methods of the invention include, but are not limited to, radioisotopes known in the art, compounds such as, for example, antibodies (or complement fixing containing portions thereof) that bind an inherent or induced endogenous cytotoxic effector system, thymidine kinase, endonuclease, RNAse, alpha toxin, ricin, abrin, Pseudomonas exotoxin A, diphtheria toxin, saporin, momordin, gelonin, pokeweed antiviral protein, alpha-sarcin and cholera toxin. By “cytotoxic prodrug” is meant a non-toxic compound that is converted by an enzyme, normally present in the cell, into a cytotoxic compound. Cytotoxic prodrugs that may be used according to the methods of the invention include, but are not limited to, glutamyl derivatives of benzoic acid mustard alkylating agent, phosphate derivatives of etoposide or mitomycin C, cytosine arabinoside, daunorubisin, and phenoxyacetamide derivatives of doxorubicin. Drug Screening

[0721] Further contemplated is the use of the polypeptides of the present invention, or the polynucleotides encoding these polypeptides, to screen for molecules which modify the activities of the polypeptides of the present invention. Such a method would include contacting the polypeptide of the present invention with a selected compouns) suspected of having antagonist or agonist activity, and assaying the activity of these polypeptides following binding.

[0722] This invention is particularly useful for screening therapeutic compounds by using the polypeptides of the present invention, or binding fragments thereof, in any of a variety of drug screening techniques. The polypeptide or fragment employed in such a test may be affixed to a solid support, expressed on a cell surface, free in solution, or located intracellularly. One method of drug screening utilizes eukaryotic or prokaryotic host cells which are stably transformed with recombinant nucleic acids expressing the polypeptide or fragment. Drugs are screened against such transformed cells in competitive binding assays. One may measure, for example, the formulation of complexes between the agent being tested and a polypeptide of the present invention.

[0723] Thus, the present invention provides methods of screening for drugs or any other agents which affect activities mediated by the polypeptides of the present invention. These methods comprise contacting such an agent with a polypeptide of the present invention or a fragment thereof and assaying for the presence of a complex between the agent and the polypeptide or a fragment thereof, by methods well known in the art. In such a competitive binding assay, the agents to screen are typically labeled. Following incubation, free agent is separated from that present in bound form, and the amount of free or uncomplexed label is a measure of the ability of a particular agent to bind to the polypeptides of the present invention.

[0724] Another technique for drug screening provides high throughput screening for compounds having suitable binding affinity to the polypeptides of the present invention, and is described in great detail in European Patent Application 84/03564, published on Sep. 13, 1984, which is incorporated herein by reference herein. Briefly stated, large numbers of different small peptide test compounds are synthesized on a solid substrate, such as plastic pins or some other surface. The peptide test compounds are reacted with polypeptides of the present invention and washed. Bound polypeptides are then detected by methods well known in the art. Purified polypeptides are coated directly onto plates for use in the aforementioned drug screening techniques. In addition, non-neutralizing antibodies may be used to capture the peptide and immobilize it on the solid support.

[0725] This invention also contemplates the use of competitive drug screening assays in which neutralizing antibodies capable of binding polypeptides of the present invention specifically compete with a test compound for binding to the polypeptides or fragments thereof. In this manner, the antibodies are used to detect the presence of any peptide which shares one or more antigenic epitopes with a polypeptide of the invention. Antisense And Ribozyme (Antagonists)

[0726] In specific embodiments, antagonists according to the present invention are nucleic acids corresponding to the sequences contained in SEQ ID NO:X, or the complementary strand thereof, and/or to nucleotide sequences contained in the cDNA contained in the related cDNA clone identified in Table 1. In one embodiment, antisense sequence is generated internally, by the organism, in another embodiment, the antisense sequence is separately administered (see, for example, O° C.onnor, J., Neurochem. 56:560 (1991). Oligodeoxynucleotides as Antisense Inhibitors of Gene Expression, CRC Press, Boca Raton, FL (1988). Antisense technology can be used to control gene expression through antisense DNA or RNA, or through triple-helix formation. Antisense techniques are discussed for example, in Okano, J., Neurochem. 56:560 (1991); Oligodeoxynucleotides as Antisense Inhibitors of Gene Expression, CRC Press, Boca Raton, FL (1988). Triple helix formation is discussed in, for instance, Lee et al., Nucleic Acids Research 6:3073 (1979); Cooney et al., Science 241:456 (1988); and Dervan et al., Science 251:1300 (1991). The methods are based on binding of a polynucleotide to a complementary DNA or RNA.

[0727] For example, the use of c-myc and c-myb antisense RNA constructs to inhibit the growth of the non-lymphocytic leukemia cell line HL-60 and other cell lines was previously described. (Wickstrom et al. (1988); Anfossi et al. (1989)). These experiments were performed in vitro by incubating cells with the oligoribonucleotide. A similar procedure for in vivo use is described in WO 91/15580. Briefly, a pair of oligonucleotides for a given antisense RNA is produced as follows: A sequence complimentary to the first 15 bases of the open reading frame is flanked by an EcoRI site on the 5 end and a HindHI site on the 3 end. Next, the pair of oligonucleotides is heated at 90° C. for one minute and then annealed in 2× ligation buffer (20 mM TRIS HCl pH 7.5, 10 mM MgCl₂, 10 MM dithiothreitol (DTT) and 0.2 mM ATP) and thenigated to the EcoRI/Hind III site of the retroviral vector PMV7 (WO 91/15580).

[0728] For example, the 5′ coding portion of a polynucleotide that encodes the polypeptide of the present invention may be used to design an antisense RNA oligonucleotide of from about 10 to 40 base pairs in length. A DNA oligonucleotide is designed to be complementary to a region of the gene involved in transcription thereby preventing transcription and the production of the receptor. The antisense RNA oligonucleotide hybridizes to the MRNA in vivo and blocks translation of the mRNA molecule into receptor polypeptide.

[0729] In one embodiment, the antisense nucleic acid of the invention is produced intracellularly by transcription from an exogenous sequence. For example, a vector or a portion thereof, is transcribed, producing an antisense nucleic acid (RNA) of the invention. Such a vector would contain a sequence encoding the antisense nucleic acid. Such a vector can remain episomal or become chromosomally integrated, as long as it can be transcribed to produce the desired antisense RNA. Such vectors can be constructed by recombinant DNA technology methods standard in the art. Vectors can be plasmid, viral, or others known in the art, used for replication and expression in vertebrate cells. Expression of the sequence encoding the polypeptide of the present invnetion or fragments thereof, can be by any promoter known in the art to act in vertebrate, preferably human cells. Such promoters can be inducible or constitutive. Such promoters include, but are not limited to, the SV40 early promoter region (Bemoist and Chambon, Nature 29:304-310 (1981), the promoter contained in the 3′ long terminal repeat of Rous sarcoma virus (Yamamoto et al., Cell 22:787-797 (1980), the herpes thymidine promoter (Wagner et al., Proc. Natl. Acad. Sci. U.S.A. 78:1441-1445 (1981), the regulatory sequences of the metallothionein gene (Brinster, et al., Nature 296:39-42 (1982)), etc.

[0730] The antisense nucleic acids of the invention comprise a sequence complementary to at least a portion of an RNA transcript of a gene of the present invention. However, absolute complementarity, although preferred, is not required. A sequence “complementary to at least a portion of an RNA,” referred to herein, means a sequence having sufficient complementarity to be able to hybridize with the RNA, forming a stable duplex; in the case of double stranded antisense nucleic acids, a single strand of the duplex DNA may thus be tested, or triplex formation may be assayed. The ability to hybridize will depend on both the degree of complementarity and the length of the antisense nucleic acid. Generally, the larger the hybridizing nucleic acid, the more base mismatches with a RNA it may contain and still form a stable duplex (or triplex as the case may be). One skilled in the art can ascertain a tolerable degree of mismatch by use of standard procedures to determine the melting point of the hybridized complex.

[0731] Oligonucleotides that are complementary to the 5′ end of the message, e.g., the 5′ untranslated sequence up to and including the AUG initiation codon, should work most efficiently at inhibiting translation. However, sequences complementary to the 3′ untranslated sequences of mRNAs have been shown to be effective at inhibiting translation of mRNAs as well. See generally, Wagner, R., 1994, Nature 372:333-335. Thus, oligonucleotides complementary to either the 5′- or 3′- non- translated, non-coding regions of polynucleotide sequences described herein could be used in an antisense approach to inhibit translation of endogenous mRNA. Oligonucleotides complementary to the 5′ untranslated region of the mRNA should include the complement of the AUG start codon. Antisense oligonucleotides complementary to mRNA coding regions are less efficient inhibitors of translation but could be used in accordance with the invention. Whether designed to hybridize to the 5′-, 3′- or coding region of mRNA of the present invention, antisense nucleic acids should be at least six nucleotides in length, and are preferably oligonucleotides ranging from 6 to about 50 nucleotides in length. In specific aspects the oligonucleotide is at least 10 nucleotides, at least 17 nucleotides, at least 25 nucleotides or at least 50 nucleotides.

[0732] The polynucleotides of the invention can be DNA or RNA or chimeric mixtures or derivatives or modified versions thereof, single-stranded or double-stranded. The oligonucleotide can be modified at the base moiety, sugar moiety, or phosphate backbone, for example, to improve stability of the molecule, hybridization, etc. The oligonucleotide may include other appended groups such as peptides (e.g., for targeting host cell receptors in vivo), or agents facilitating transport across the cell membrane (see, e.g., Letsinger et al., 1989, Proc. Natl. Acad. Sci. U.S.A. 86:6553-6556; Lemaitre et al., 1987, Proc. Natl. Acad. Sci. 84:648-652; PCT Publication No. WO88/09810, published December 15, 1988) or the blood-brain barrier (see, e.g., PCT Publication No. WO89/10134, published April 25, 1988), hybridization-triggered cleavage agents. (See, e.g., Krol et al., 1988, BioTechniques 6:958-976) or intercalating agents. (See, e.g., Zon, 1988, Pharm. Res. 5:539-549). To this end, the oligonucleotide may be conjugated to another molecule, e.g., a peptide, hybridization triggered cross-linking agent, transport agent, hybridization-triggered cleavage agent, etc.

[0733] The antisense oligonucleotide may comprise at least one modified base moiety which is selected from the group including, but not limited to, 5-fluorouracil, 5-bromouracil, 5-chlorouracil, 5-iodouracil, hypoxanthine, xantine, 4-acetylcytosine, 5-(carboxyhydroxylmethyl) uracil, 5-carboxymethylaminomethyl-2-thiouridine, 5-carboxymethylaminomethyluracil, dihydrouracil, beta-D-galactosylqueosine, inosine, N6-isopentenyladenine, 1-methylguanine, 1-methylinosine, 2,2-dimethylguanine, 2-methyladenine, 2-methylguanine, 3-methylcytosine, 5-methylcytosine, N6-adenine, 7-methylguanine, 5-methylaminomethyluracil, 5-methoxyaminomethyl-2-thiouracil, beta-D-mannosylqueosine, 5′-methoxycarboxymethyluracil, 5-methoxyuracil, 2-methylthio-N6-isopentenyladenine, uracil-5-oxyacetic acid (v), wybutoxosine, pseudouracil, queosine, 2-thiocytosine, 5-methyl-2-thiouracil, 2-thiouracil, 4-thiouracil, 5-methyluracil, uracil-5-oxyacetic acid methylester, uracil-5-oxyacetic acid (v), 5-methyl-2-thiouracil, 3-(3-amino-3-N-2-carboxypropyl) uracil, (acp3)w, and 2,6-diaminopurine.

[0734] The antisense oligonucleotide may also comprise at least one modified sugar moiety selected from the group including, but not limited to, arabinose, 2-fluoroarabinose, xylulose, and hexose.

[0735] In yet another embodiment, the antisense oligonucleotide comprises at least one modified phosphate backbone selected from the group including, but not limited to, a phosphorothioate, a phosphorodithioate, a phosphoramidothioate, a phosphoramidate, a phosphordiamidate, a methylphosphonate, an alkyl phosphotriester, and a formacetal or analog thereof.

[0736] In yet another embodiment, the antisense oligonucleotide is an a-anomeric oligonucleotide. An a-anomeric oligonucleotide forms specific double-stranded hybrids with complementary RNA in which, contrary to the usual b-units, the strands run parallel to each other (Gautier et al., 1987, Nucl. Acids Res. 15:6625-6641). The oligonucleotide is a 2′-O-methylribonucleotide (Inoue et al., 1987, Nucl. Acids Res. 15:6131-6148), or a chimeric RNA-DNA analogue (Inoue et al., 1987, FEBS Lett. 215:327-330).

[0737] Polynucleotides of the invention may be synthesized by standard methods known in the art, e.g. by use of an automated DNA synthesizer (such as are commercially available from Biosearch, Applied Biosystems, etc.). As examples, phosphorothioate oligonucleotides may be synthesized by the method of Stein et al. (1988, Nucl. Acids Res. 16:3209), methylphosphonate oligonucleotides can be prepared by use of controlled pore glass polymer supports (Sarin et al., 1988, Proc. Natl. Acad. Sci. U.S.A. 85:7448-7451), etc.

[0738] While antisense nucleotides complementary to the coding region sequence could be used, those complementary to the transcribed untranslated region are most preferred.

[0739] Potential antagonists according to the invention also include catalytic RNA, or a ribozyme (See, e.g., PCT International Publication WO 90/11364, published October 4, 1990; Sarver et al, Science 247:1222-1225 (1990). While ribozymes that cleave mRNA at site specific recognition sequences can be used to destroy mRNAs, the use of hammerhead ribozymes is preferred. Hammerhead ribozymes cleave mRNAs at locations dictated by flanking regions that form complementary base pairs with the target mRNA. The sole requirement is that the target mRNA have the following sequence of two bases: 5′-UG-3′. The construction and production of hammerhead ribozymes is well known in the art and is described more fully in Haseloff and Gerlach, Nature 334:585-591 (1988). There are numerous potential hammerhead ribozyme cleavage sites within the nucleotide sequence of SEQ ID NO:X. Preferably, the ribozyme is engineered so that the cleavage recognition site is located near the 5′ end of the mRNA; i.e., to increase efficiency and minimize the intracellular accumulation of non-functional mRNA transcripts.

[0740] As in the antisense approach, the ribozymes of the invention can be composed of modified oligonucleotides (e.g. for improved stability, targeting, etc.) and should be delivered to cells which express in vivo. DNA constructs encoding the ribozyme may be introduced into the cell in the same manner as described above for the introduction of antisense encoding DNA. A preferred method of delivery involves using a DNA construct “encoding” the ribozyme under the control of a strong constitutive promoter, such as, for example, pol III or pol II promoter, so that transfected cells will produce sufficient quantities of the ribozyme to destroy endogenous messages and inhibit translation. Since ribozymes unlike antisense molecules, are catalytic, a lower intracellular concentration is required for efficiency.

[0741] Antagonist/agonist compounds may be employed to inhibit the cell growth and proliferation effects of the polypeptides of the present invention on neoplastic cells and tissues, i.e. stimulation of angiogenesis of tumors, and, therefore, retard or prevent abnormal cellular growth and proliferation, for example, in tumor formation or growth.

[0742] The antagonist/agonist may also be employed to prevent hyper-vascular diseases, and prevent the proliferation of epithelial lens cells after extracapsular cataract surgery. Prevention of the mitogenic activity of the polypeptides of the present invention may also be desirous in cases such as restenosis after balloon angioplasty.

[0743] The antagonist/agonist may also be employed to prevent the growth of scar tissue during wound healing.

[0744] The antagonist/agonist may also be employed to treat the diseases described herein.

[0745] Thus, the invention provides a method of treating disorders or diseases, including but not limited to the disorders or diseases listed throughout this application, associated with overexpression of a polynucleotide of the present invention by administering to a patient (a) an antisense molecule directed to the polynucleotide of the present invention, and/or (b) a ribozyme directed to the polynucleotide of the present invention. Binding Peptides and Other Molecules

[0746] The invention also encompasses screening methods for identifying polypeptides and nonpolypeptides that bind lung cancer antigen polypeptides, and the lung cancer antigen binding molecules identified thereby. These binding molecules are useful, for example, as agonists and antagonists of the lung cancer antigen polypeptides. Such agonists and antagonists can be used, in accordance with the invention, in the therapeutic embodiments described in detail, below.

[0747] This method comprises the steps of:

[0748] contacting lung cancer antigen polypeptides or lung cancer antigen-like polypeptides with a plurality of molecules; and

[0749] identifying a molecule that binds the lung cancer antigen polypeptides or lung cancer antigen-like polypeptides.

[0750] The step of contacting the lung cancer antigen polypeptides or lung cancer antigen-like polypeptides with the plurality of molecules may be effected in a number of ways. For example, one may contemplate immobilizing the lung cancer antigen polypeptides or lung cancer antigen-like polypeptides on a solid support and bringing a solution of the plurality of molecules in contact with the immobilized lung cancer antigen polypeptides or lung cancer antigen-like polypeptides. Such a procedure would be akin to an affinity chromatographic process, with the affinity matrix being comprised of the immobilized lung cancer antigen polypeptides or lung cancer antigen-like polypeptides. The molecules having a selective affinity for the lung cancer antigen polypeptides or lung cancer antigen-like polypeptides can then be purified by affinity selection. The nature of the solid support, process for attachment of the lung cancer antigen polypeptides or lung cancer antigen-like polypeptides to the solid support, solvent, and conditions of the affinity isolation or selection are largely conventional and well known to those of ordinary skill in the art.

[0751] Alternatively, one may also separate a plurality of polypeptides into substantially separate fractions comprising a subset of or individual polypeptides. For instance, one can separate the plurality of polypeptides by gel electrophoresis, column chromatography, or like method known to those of ordinary skill for the separation of polypeptides. The individual polypeptides can also be produced by a transformed host cell in such a way as to be expressed on or about its outer surface (e.g., a recombinant phage). Individual isolates can then be “probed” by the lung cancer antigen polypeptides or lung cancer antigen-like polypeptides, optionally in the presence of an inducer should one be required for expression, to determine if any selective affinity interaction takes place between the lung cancer antigen polypeptides or lung cancer antigen-like polypeptides and the individual clone. Prior to contacting the lung cancer antigen polypeptides or lung cancer antigen-like polypeptides with each fraction comprising individual polypeptides, the polypeptides could first be transferred to a solid support for additional convenience. Such a solid support may simply be a piece of filter membrane, such as one made of nitrocellulose or nylon. In this manner, positive clones could be identified from a collection of transformed host cells of an expression library, which harbor a DNA construct encoding a polypeptide having a selective affinity for lung cancer antigen polypeptides or lung cancer antigen-like polypeptides. Furthermore, the amino acid sequence of the polypeptide having a selective affinity for the lung cancer antigen polypeptides or lung cancer antigen-like polypeptides can be determined directly by conventional means or the coding sequence of the DNA encoding the polypeptide can frequently be determined more conveniently. The primary sequence can then be deduced from the corresponding DNA sequence. If the amino acid sequence is to be determined from the polypeptide itself, one may use microsequencing techniques. The sequencing technique may include mass spectroscopy.

[0752] In certain situations, it may be desirable to wash away any unbound lung cancer antigen polypeptides or lung cancer antigen-like polypeptides, or alternatively, unbound polypeptides, from a mixture of the lung cancer antigen polypeptides or lung cancer antigen-like polypeptides and the plurality of polypeptides prior to attempting to determine or to detect the presence of a selective affinity interaction. Such a wash step may be particularly desirable when the lung cancer antigen polypeptides or lung cancer antigen-like polypeptides or the plurality of polypeptides is bound to a solid support.

[0753] The plurality of molecules provided according to this method may be provided by way of diversity libraries, such as random or combinatorial peptide or nonpeptide libraries which can be screened for molecules that specifically bind lung cancer antigen polypeptides. Many libraries are known in the art that can be used, e.g., chemically synthesized libraries, recombinant (e.g., phage display libraries), and in vitro translation-based libraries. Examples of chemically synthesized libraries are described in Fodor et al., 1991, Science 251:767-773; Houghten et al., 1991, Nature 354:84-86; Lam et al., 1991, Nature 354:82-84; Medynski, 1994, Bio/Technology 12:709-710;Gallop et al., 1994, J. Medicinal Chemistry 37(9):1233-1251; Ohlmeyer et al., 1993, Proc. Natl. Acad. Sci. USA 90:10922-10926; Erb et al., 1994, Proc. Natl. Acad. Sci. USA 91:11422-11426; Houghten et al., 1992, Biotechniques 13:412; Jayawickreme et al., 1994, Proc. Natl. Acad. Sci. USA 91:1614-1618; Salmon et al., 1993, Proc. Natl. Acad. Sci. USA 90:11708-11712; PCT Publication No. WO 93/20242; and Brenner and Lemer, 1992, Proc. Natl. Acad. Sci. USA 89:5381-5383.

[0754] Examples of phage display libraries are described in Scott and Smith, 1990, Science 249:386-390; Devlin et al., 1990, Science, 249:404-406; Christian, R. B., et al., 1992, J. Mol. Biol. 227:711-718); Lenstra, 1992, J. lmmunol. Meth. 152:149-157; Kay et al., 1993, Gene 128:59-65; and PCT Publication No. WO 94/18318 dated Aug. 18, 1994.

[0755] In vitro translation-based libraries include but are not limited to those described in PCT Publication No. WO 91/05058 dated Apr. 18, 1991; and Mattheakis et al., 1994, Proc. Natl. Acad. Sci. USA 91:9022-9026.

[0756] By way of examples of nonpeptide libraries, a benzodiazepine library (see e.g., Bunin et al., 1994, Proc. Natl. Acad. Sci. USA 91:4708-4712) can be adapted for use. Peptoid libraries (Simon et al., 1992, Proc. Natl. Acad. Sci. USA 89:9367-9371) can also be used. Another example of a library that can be used, in which the amide functionalities in peptides have been permethylated to generate a chemically transformed combinatorial library, is described by Ostresh et al. (1994, Proc. Natl. Acad. Sci. USA 91:11138-11142).

[0757] The variety of non-peptide libraries that are useful in the present invention is great. For example, Ecker and Crooke, 1995, Bio/Technology 13:351-360 list benzodiazepines, hydantoins, piperazinediones, biphenyls, sugar analogs, beta-mercaptoketones, arylacetic acids, acylpiperidines, benzopyrans, cubanes, xanthines, aminimides, and oxazolones as among the chemical species that form the basis of various libraries.

[0758] Non-peptide libraries can be classified broadly into two types: decorated monomers and oligomers. Decorated monomer libraries employ a relatively simple scaffold structure upon which a variety functional groups is added. Often the scaffold will be a molecule with a known useful pharmacological activity. For example, the scaffold might be the benzodiazepine structure.

[0759] Non-peptide oligomer libraries utilize a large number of monomers that are assembled together in ways that create new shapes that depend on the order of the monomers. Among the monomer units that have been used are carbamates, pyrrolinones, and morpholinos. Peptoids, peptide-like oligomers in which the side chain is attached to the alpha amino group rather than the alpha carbon, form the basis of another version of non-peptide oligomer libraries. The first non-peptide oligomer libraries utilized a single type of monomer and thus contained a repeating backbone. Recent libraries have utilized more than one monomer, giving the libraries added flexibility.

[0760] Screening the libraries can be accomplished by any of a variety of commonly known methods. See, e.g., the following references, which disclose screening of peptide libraries: Parmley and Smith, 1989, Adv. Exp. Med. Biol. 251:215-218; Scott and Smith, 1990, Science 249:386-390; Fowlkes et al., 1992; BioTechniques 13:422-427; Oldenburg et al., 1992, Proc. Natl. Acad. Sci. USA 89:5393-5397; Yu et al., 1994, Cell 76:933-945; Staudt et al., 1988, Science 241:577-580; Bock et al., 1992, Nature 355:564-566; Tuerk et al., 1992, Proc. Natl. Acad. Sci. USA 89:6988-6992; Ellington et al., 1992, Nature 355:850-852; U.S. Pat. No. 5,096,815, U.S. Pat. No. 5,223,409, and U.S. Pat. No. 5,198,346, all to Ladner et al.; Rebar and Pabo, 1993, Science 263:671-673; and CT Publication No. WO 94/18318.

[0761] In a specific embodiment, screening to identify a molecule that binds lung cancer antigen polypeptides can be carried out by contacting the library members with a lung cancer antigen polypeptides or lung cancer antigen-like polypeptides immobilized on a solid phase and harvesting those library members that bind to the lung cancer antigen polypeptides or lung cancer antigen-like polypeptides. Examples of such screening methods, termed “panning” techniques are described by way of example in Parmley and Smith, 1988, Gene 73:305-318; Fowlkes et al., 1992, BioTechniques 13:422-427; International Publication No. WO 94/18318; and in references cited herein.

[0762] In another embodiment, the two-hybrid system for selecting interacting proteins in yeast (Fields and Song, 1989, Nature 340:245-246; Chien et al., 1991, Proc. Natl. Acad. Sci. USA 88:9578-9582) can be used to identify molecules that specifically bind to lung cancer antigen polypeptides or lung cancer antigen-like polypeptides.

[0763] Where the lung cancer antigen binding molecule is a polypeptide, the polypeptide can be conveniently selected from any peptide library, including random peptide libraries, combinatorial peptide libraries, or biased peptide libraries. The term “biased” is used herein to mean that the method of generating the library is manipulated so as to restrict one or more parameters that govern the diversity of the resulting collection of molecules, in this case peptides.

[0764] Thus, a truly random peptide library would generate a collection of peptides in which the probability of finding a particular amino acid at a given position of the peptide is the same for all 20 amino acids. A bias can be introduced into the library, however, by specifying, for example, that a lysine occurs every fifth amino acid or that positions 4, 8, and 9 of a decapeptide library be fixed to include only arginine. Clearly, many types of biases can be contemplated, and the present invention is not restricted to any particular bias. Furthermore, the present invention contemplates specific types of peptide libraries, such as phage displayed peptide libraries and those that utilize a DNA construct comprising a lambda phage vector with a DNA insert.

[0765] As mentioned above, in the case of a lung cancer antigen binding molecule that is a polypeptide, the polypeptide may have about 6 to less than about 60 amino acid residues, preferably about 6 to about 10 amino acid residues, and most preferably, about 6 to about 22 amino acids. In another embodiment, a lung cancer antigen binding polypeptide has in the range of 15-100 amino acids, or 20-50 amino acids.

[0766] The selected lung cancer antigen binding polypeptide can be obtained by chemical synthesis or recombinant expression. Other Activities

[0767] A polypeptide, polynucleotide, agonist, or antagonist of the present invention, as a result of the ability to stimulate vascular endothelial cell growth, may be employed in treatment for stimulating re-vascularization of ischemic tissues due to various disease conditions such as thrombosis, arteriosclerosis, and other cardiovascular conditions. The polypeptide, polynucleotide, agonist, or antagonist of the present invention may also be employed to stimulate angiogenesis and limb regeneration, as discussed above.

[0768] A polypeptide, polynucleotide, agonist, or antagonist of the present invention may also be employed for treating wounds due to injuries, burns, post-operative tissue repair, and ulcers since they are mitogenic to various cells of different origins, such as fibroblast cells and skeletal muscle cells, and therefore, facilitate the repair or replacement of damaged or diseased tissue.

[0769] A polypeptide, polynucleotide, agonist, or antagonist of the present invention may also be employed stimulate neuronal growth and to treat and prevent neuronal damage which occurs in certain neuronal disorders or neuro-degenerative conditions such as Alzheimer's disease, Parkinson's disease, and AIDS-related complex. A polypeptide, polynucleotide, agonist, or antagonist of the present invention may have the ability to stimulate chondrocyte growth, therefore, they may be employed to enhance bone and periodontal regeneration and aid in tissue transplants or bone grafts.

[0770] A polypeptide, polynucleotide, agonist, or antagonist of the present invention may be also be employed to prevent skin aging due to sunburn by stimulating keratinocyte growth.

[0771] A polypeptide, polynucleotide, agonist, or antagonist of the present invention may also be employed for preventing hair loss, since FGF family members activate hair-forming cells and promotes melanocyte growth. Along the same lines, a polypeptide, polynucleotide, agonist, or antagonist of the present invention may be employed to stimulate growth and differentiation of hematopoietic cells and bone marrow cells when used in combination with other cytokines.

[0772] A polypeptide, polynucleotide, agonist, or antagonist of the present invention may also be employed to maintain organs before transplantation or for supporting cell culture of primary tissues. A polypeptide, polynucleotide, agonist, or antagonist of the present invention may also be employed for inducing tissue of mesodermal origin to differentiate in early embryos.

[0773] A polypeptide, polynucleotide, agonist, or antagonist of the present invention may also increase or decrease the differentiation or proliferation of embryonic stem cells, besides, as discussed above, hematopoietic lineage.

[0774] A polypeptide, polynucleotide, agonist, or antagonist of the present invention may also be used to modulate mammalian characteristics, such as body height, weight, hair color, eye color, skin, percentage of adipose tissue, pigmentation, size, and shape (e.g., cosmetic surgery). Similarly, a polypeptide, polynucleotide, agonist, or antagonist of the present invention may be used to modulate mammalian metabolism affecting catabolism, anabolism, processing, utilization, and storage of energy.

[0775] A polypeptide, polynucleotide, agonist, or antagonist of the present invention may be used to change a mammal's mental state or physical state by influencing biorhythms, caricadic rhythms, depression (including depressive disorders), tendency for violence, tolerance for pain, reproductive capabilities (preferably by Activin or Inhibin-like activity), hormonal or endocrine levels, appetite, libido, memory, stress, or other cognitive qualities.

[0776] A polypeptide, polynucleotide, agonist, or antagonist of the present invention may also be used as a food additive or preservative, such as to increase or decrease storage capabilities, fat content, lipid, protein, carbohydrate, vitamins, minerals, cofactors or other nutritional components.

[0777] The above-recited applications have uses in a wide variety of hosts. Such hosts include, but are not limited to, human, murine, rabbit, goat, guinea pig, camel, horse, mouse, rat, hamster, pig, micro-pig, chicken, goat, cow, sheep, dog, cat, non-human primate, and human. In specific embodiments, the host is a mouse, rabbit, goat, guinea pig, chicken, rat, hamster, pig, sheep, dog or cat. In preferred embodiments, the host is a mammal. In most preferred embodiments, the host is a human. Other Preferred Embodiments

[0778] Other preferred embodiments of the claimed invention include an isolated nucleic acid molecule comprising a nucleotide sequence which is at least 95% identical to a sequence of at least about 50 contiguous nucleotides in the nucleotide sequence of SEQ ID NO:X or the complementary strand thereto, and/or the cDNA in the related cDNA clone contained in the deposit.

[0779] Also preferred is a nucleic acid molecule wherein said sequence of contiguous nucleotides is included in the nucleotide sequence of SEQ ID NO:X in the range of positions identified as “Start” and “End” in columns 7 and 8 as defined for SEQ ID NO:X in Table 1.

[0780] Also preferred is an isolated nucleic acid molecule comprising a nucleotide sequence which is at least 95% identical to a sequence of at least about 150 contiguous nucleotides in the nucleotide sequence of SEQ ID NO:X or the complementary strand thereto, and/or the cDNA in the related cDNA clone contained in the deposit.

[0781] Further preferred is an isolated nucleic acid molecule comprising a nucleotide sequence which is at least 95% identical to a sequence of at least about 500 contiguous nucleotides in the nucleotide sequence of SEQ ID NO:X or the complementary strand thereto, and/or the cDNA in the related cDNA clone contained in the deposit.

[0782] A further preferred embodiment is a nucleic acid molecule comprising a nucleotide sequence which is at least 95% identical to the nucleotide sequence of SEQ ID NO:X in the range of positions identified as “Start” and “End” in columns 7 and 8 as defined for SEQ ID NO:X in Table 1.

[0783] A further preferred embodiment is an isolated nucleic acid molecule comprising a nucleotide sequence which is at least 95% identical to the complete nucleotide sequence of SEQ ID NO:X or the complementary strand thereto, and/or the cDNA in the related cDNA clone contained in the deposit.

[0784] Also preferred is an isolated nucleic acid molecule which hybridizes under stringent hybridization conditions to a nucleic acid molecule comprising a nucleotide sequence of SEQ ID NO:X or the complementary strand thereto, and/or the cDNA in the related cDNA clone contained in the deposit, wherein said nucleic acid molecule which hybridizes does not hybridize under stringent hybridization conditions to a nucleic acid molecule having a nucleotide sequence consisting of only A residues or of only T residues.

[0785] Also preferred is a composition of matter comprising a DNA molecule which comprises a cDNA clone contained in the deposit.

[0786] Also preferred is an isolated nucleic acid molecule comprising a nucleotide sequence which is at least 95% identical to a sequence of at least 50 contiguous nucleotides in the nucleotide sequence of the cDNA in the related cDNA clone contained in the deposit.

[0787] Also preferred is an isolated nucleic acid molecule, wherein said sequence of at least 50 contiguous nucleotides is included in the nucleotide sequence of an open reading frame sequence encoded by the cDNA in the related cDNA clone contained in the deposit.

[0788] Also preferred is an isolated nucleic acid molecule comprising a nucleotide sequence which is at least 95% identical to sequence of at least 150 contiguous nucleotides in the nucleotide sequence encoded by the cDNA in the related cDNA clone contained in the deposit.

[0789] A further preferred embodiment is an isolated nucleic acid molecule comprising a nucleotide sequence which is at least 95% identical to sequence of at least 500 contiguous nucleotides in the nucleotide sequence encoded by the cDNA in the related cDNA clone contained in the deposit.

[0790] A further preferred embodiment is an isolated nucleic acid molecule comprising a nucleotide sequence which is at least 95% identical to the complete nucleotide sequence encoded by the cDNA in the related cDNA clone contained in the deposit.

[0791] A further preferred embodiment is a method for detecting in a biological sample a nucleic acid molecule comprising a nucleotide sequence which is at least 95% identical to a sequence of at least 50 contiguous nucleotides in a sequence selected from the group consisting of: a nucleotide sequence of SEQ ID NO:X or the complementary strand thereto; and a nucleotide sequence encoded by the cDNA in the related cDNA clone contained in the deposit; which method comprises a step of comparing a nucleotide sequence of at least one nucleic acid molecule in said sample with a sequence selected from said group and determining whether the sequence of said nucleic acid molecule in said sample is at least 95% identical to said selected sequence.

[0792] Also preferred is the above method wherein said step of comparing sequences comprises determining the extent of nucleic acid hybridization between nucleic acid molecules in said sample and a nucleic acid molecule comprising said sequence selected from said group. Similarly, also preferred is the above method wherein said step of comparing sequences is performed by comparing the nucleotide sequence determined from a nucleic acid molecule in said sample with said sequence selected from said group. The nucleic acid molecules can comprise DNA molecules or RNA molecules.

[0793] A further preferred embodiment is a method for identifying the species, tissue or cell type of a biological sample which method comprises a step of detecting nucleic acid molecules in said sample, if any, comprising a nucleotide sequence that is at least 95% identical to a sequence of at least 50 contiguous nucleotides in a sequence selected from the group consisting of: a nucleotide sequence of SEQ ID NO:X or the complementary strand thereto; and a nucleotide sequence encoded by the cDNA in the related cDNA clone contained in the deposit.

[0794] Also preferred is the above method for identifying the species, tissue or cell type of a biological sample which comprises a step of detecting nucleic acid molecules comprising a nucleotide sequence in a panel of at least two nucleotide sequences, wherein at least one sequence in said panel is at least 95% identical to a sequence of at least 50 contiguous nucleotides in a sequence selected from said group.

[0795] Also preferred is a method for diagnosing in a subject a pathological condition associated with abnormal structure or expression of a nucleotide sequence of SEQ ID NO:X; or the cDNA in the related cDNA clone identified in Table 1 which encodes a protein, wherein the method comprises a step of detecting in a biological sample obtained from said subject nucleic acid molecules, if any, comprising a nucleotide sequence that is at least 95% identical to a sequence of at least 50 contiguous nucleotides in a sequence selected from the group consisting of: a nucleotide sequence of SEQ ID NO:X or the complementary strand thereto; and a nucleotide sequence of the cDNA in the related cDNA clone contained in the deposit.

[0796] Also preferred is the above method for diagnosing a pathological condition which comprises a step of detecting nucleic acid molecules comprising a nucleotide sequence in a panel of at least two nucleotide sequences, wherein at least one sequence in said panel is at least 95% identical to a sequence of at least 50 contiguous nucleotides in a sequence selected from said group.

[0797] Also preferred is a composition of matter comprising isolated nucleic acid molecules wherein the nucleotide sequences of said nucleic acid molecules comprise a panel of at least two nucleotide sequences, wherein at least one sequence in said panel is at least 95% identical to a sequence of at least 50 contiguous nucleotides in a sequence selected from the group consisting of: a nucleotide sequence of SEQ ID NO:X or the complementary strand thereto; and a nucleotide sequence encoded by the cDNA in the related cDNA clone contained in the deposit. The nucleic acid molecules can comprise DNA molecules or RNA molecules.

[0798] Also preferred is a composition of matter comprising isolated nucleic acid molecules wherein the nucleotide sequences of said nucleic acid molecules comprise a DNA microarray or “chip” of at least 1, 2, 3, 4, 5, 6, 7, 8, 9, 10, 15, 20, 25, 30, 40, 50, 100, 150, 200, 250, 300, 500, 1000, 2000, 3000 or 4000 nucleotide sequences, wherein at least one sequence in said DNA microarray or “chip” is at least 95% identical to a sequence of at least 50 contiguous nucleotides in a sequence selected from the group consisting of: a nucleotide sequence of SEQ ID NO:X or the complementary strand thereto; and a nucleotide sequence encoded by the cDNA in the cDNA clone referenced in Table 1. The nucleic acid molecules can comprise DNA molecules or RNA molecules.

[0799] Also preferred is an isolated polypeptide comprising an amino acid sequence at least 90% identical to a sequence of at least about 10 contiguous amino acids in the polypeptide sequence of SEQ ID NO:Y; a polypeptide encoded by SEQ ID NO:X; and/or a polypeptide encoded by the cDNA in the related cDNA clone contained in the deposit.

[0800] Also preferred is an isolated polypeptide comprising an amino acid sequence at least 95% identical to a sequence of at least about 30 contiguous amino acids in the amino acid sequence of SEQ ID NO:Y; a polypeptide encoded by SEQ ID NO:X; and/or a polypeptide encoded by the cDNA in the related cDNA clone contained in the deposit.

[0801] Further preferred is an isolated polypeptide comprising an amino acid sequence at least 95% identical to a sequence of at least about 100 contiguous amino acids in the amino acid sequence of SEQ ID NO:Y; a polypeptide encoded by SEQ ID NO:X; and/or a polypeptide encoded by the cDNA in the related cDNA clone contained in the deposit.

[0802] Further preferred is an isolated polypeptide comprising an amino acid sequence at least 95% identical to the complete amino acid sequence of SEQ ID NO:Y; a polypeptide encoded by SEQ ID NO:X; and/or a polypeptide encoded by the cDNA in the related cDNA clone contained in the deposit.

[0803] Further preferred is an isolated polypeptide comprising an amino acid sequence at least 90% identical to a sequence of at least about 10 contiguous amino acids in the complete amino acid sequence of a polypeptide encoded by the cDNA clone referenced in Table 1.

[0804] Also preferred is a polypeptide wherein said sequence of contiguous amino acids is included in the amino acid sequence of a portion of said polypeptide encoded by the cDNA clone referenced in Table 1; a polypeptide encoded by SEQ ID NO:X; and/or the polypeptide sequence of SEQ ID NO:Y.

[0805] Also preferred is an isolated polypeptide comprising an amino acid sequence at least 95% identical to a sequence of at least about 30 contiguous amino acids in the amino acid sequence of a polypeptide encoded by the cDNA clone referenced in Table 1.

[0806] Also preferred is an isolated polypeptide comprising an amino acid sequence at least 95% identical to a sequence of at least about 100 contiguous amino acids in the amino acid sequence of a polypeptide encoded by the cDNA clone referenced in Table 1.

[0807] Also preferred is an isolated polypeptide comprising an amino acid sequence at least 95% identical to the amino acid sequence of a polypeptide encoded by the cDNA clone referenced in Table 1.

[0808] Further preferred is an isolated antibody which binds specifically to a polypeptide comprising an amino acid sequence that is at least 90% identical to a sequence of at least 10 contiguous amino acids in a sequence selected from the group consisting of: a polypeptide sequence of SEQ ID NO:Y; a polypeptide encoded by SEQ ID NO:X; and a polypeptide encoded by the cDNA in the related cDNA clone contained in the deposit.

[0809] Further preferred is a method for detecting in a biological sample a polypeptide comprising an amino acid sequence which is at least 90% identical to a sequence of at least 10 contiguous amino acids in a sequence selected from the group consisting of: a polypeptide sequence of SEQ ID NO:Y; a polypeptide encoded by SEQ ID NO:X; and a polypeptide encoded by the cDNA in the related cDNA clone referenced in Table 1; which method comprises a step of comparing an amino acid sequence of at least one polypeptide molecule in said sample with a sequence selected from said group and determining whether the sequence of said polypeptide molecule in said sample is at least 90% identical to said sequence of at least 10 contiguous amino acids.

[0810] Also preferred is the above method wherein said step of comparing an amino acid sequence of at least one polypeptide molecule in said sample with a sequence selected from said group comprises determining the extent of specific binding of polypeptides in said sample to an antibody which binds specifically to a polypeptide comprising an amino acid sequence that is at least 90% identical to a sequence of at least 10 contiguous amino acids in a sequence selected from the group consisting of: a polypeptide sequence of SEQ ID NO:Y; a polypeptide encoded by SEQ ID NO:X; and a polypeptide encoded by the cDNA in the related cDNA clone referenced in Table 1.

[0811] Also preferred is the above method wherein said step of comparing sequences is performed by comparing the amino acid sequence determined from a polypeptide molecule in said sample with said sequence selected from said group.

[0812] Also preferred is a method for identifying the species, tissue or cell type of a biological sample which method comprises a step of detecting polypeptide molecules in said sample, if any, comprising an amino acid sequence that is at least 90% identical to a sequence of at least 10 contiguous amino acids in a sequence selected from the group consisting of: polypeptide sequence of SEQ ID NO:Y; a polypeptide encoded by SEQ ID NO:X; and a polypeptide encoded by the cDNA in the related cDNA clone referenced in Table 1.

[0813] Also preferred is the above method for identifying the species, tissue or cell type of a biological sample, which method comprises a step of detecting polypeptide molecules comprising an amino acid sequence in a panel of at least two amino acid sequences, wherein at least one sequence in said panel is at least 90% identical to a sequence of at least 10 contiguous amino acids in a sequence selected from the above group.

[0814] Also preferred is a method for diagnosing in a subject a pathological condition associated with abnormal structure or expression of a nucleic acid sequence identified in Table 1 encoding a polypeptide, which method comprises a step of detecting in a biological sample obtained from said subject polypeptide molecules comprising an amino acid sequence in a panel of at least two amino acid sequences, wherein at least one sequence in said panel is at least 90% identical to a sequence of at least 10 contiguous amino acids in a sequence selected from the group consisting of: polypeptide sequence of SEQ ID NO:Y; a polypeptide encoded by SEQ ID NO:X; and a polypeptide encoded by the cDNA in the related cDNA clone referenced in Table 1.

[0815] In any of these methods, the step of detecting said polypeptide molecules includes using an antibody.

[0816] Also preferred is an isolated nucleic acid molecule comprising a nucleotide sequence which is at least 95% identical to a nucleotide sequence encoding a polypeptide wherein said polypeptide comprises an amino acid sequence that is at least 90% identical to a sequence of at least 10 contiguous amino acids in a sequence selected from the group consisting of: polypeptide sequence of SEQ ID NO:Y; a polypeptide encoded by SEQ ID NO:X; and a polypeptide encoded by the cDNA in the related cDNA clone referenced in Table 1.

[0817] Also preferred is an isolated nucleic acid molecule, wherein said nucleotide sequence encoding a polypeptide has been optimized for expression of said polypeptide in a prokaryotic host.

[0818] Also preferred is an isolated nucleic acid molecule, wherein said polypeptide comprises an amino acid sequence selected from the group consisting of: polypeptide sequence of SEQ ID NO:Y; a polypeptide encoded by SEQ ID NO:X; and a polypeptide encoded by the cDNA in the related cDNA clone referenced in Table 1.

[0819] Further preferred is a method of making a recombinant vector comprising inserting any of the above isolated nucleic acid molecule into a vector. Also preferred is the recombinant vector produced by this method. Also preferred is a method of making a recombinant host cell comprising introducing the vector into a host cell, as well as the recombinant host cell produced by this method.

[0820] Also preferred is a method of making an isolated polypeptide comprising culturing this recombinant host cell under conditions such that said polypeptide is expressed and recovering said polypeptide. Also preferred is this method of making an isolated polypeptide, wherein said recombinant host cell is a eukaryotic cell and said polypeptide is a human protein comprising an amino acid sequence selected from the group consisting of: polypeptide sequence of SEQ ID NO:Y; a polypeptide encoded by SEQ ID NO:X; and a polypeptide encoded by the cDNA in the related cDNA clone referenced in Table 1. The isolated polypeptide produced by this method is also preferred.

[0821] Also preferred is a method of treatment of an individual in need of an increased level of a protein activity, which method comprises administering to such an individual a Therapeutic comprising an amount of an isolated polypeptide, polynucleotide, immunogenic fragment or analogue thereof, binding agent, antibody, or antigen binding fragment of the claimed invention effective to increase the level of said protein activity in said individual.

[0822] Also preferred is a method of treatment of an individual in need of a decreased level of a protein activity, which method comprised administering to such an individual a Therapeutic comprising an amount of an isolated polypeptide, polynucleotide, immunogenic fragment or analogue thereof, binding agent, antibody, or antigen binding fragment of the claimed invention effective to decrease the level of said protein activity in said individual.

[0823] Having generally described the invention, the same will be more readily understood by reference to the following examples, which are provided by way of illustration and are not intended as limiting.

### EXAMPLES

### Example 1

[0824] Isolation of a Selected CDNA Clone From the Deposited Sample

[0825] Each deposited cDNA clone is contained in a plasmid vector. Table 5 identifies the vectors used to construct the cDNA library from which each clone was isolated. In many cases, the vector used to construct the library is a phage vector from which a plasmid has been excised. The following correlates the related plasmid for each phage vector used in constructing the cDNA library. For example, where a particular clone is identified in Table 5 as being isolated in the vector “Lambda Zap,” the corresponding deposited clone is in “pBluescript.”

| Vector Used to Construct Library | Corresponding Deposited Plasmid |
|---|---|
| Lambda Zap | pBluescript (pBS) |
| Uni-Zap XR | pBluescript (pBS) |
| Zap Express | pBK |
| lafmid BA | plafmid BA |
| pSport1 | pSport1 |
| pCMVSport 2.0 | pCMVSport 2.0 |
| pCMVSport 3.0 | pCMVSport 3.0 |
| pCR ® 2.1 | pCR ® 2.1 |

[0826] Vectors Lambda Zap (U.S. Pat. Nos. 5,128,256 and 5,286,636), Uni-Zap XR (U.S. Pat. Nos. 5,128, 256 and 5,286,636), Zap Express (U.S. Pat. Nos. 5,128,256 and 5,286,636), pBluescript (pBS) (Short, J. M. et al., Nucleic Acids Res. 16:7583-7600 (1988); Alting-Mees, M. A. and Short, J. M., Nucleic Acids Res. 17:9494 (1989)) and pBK (Alting-Mees, M. A. et al., Strategies 5:58-61 (1992)) are commercially available from Stratagene Cloning Systems, Inc., 11011 N. Torrey Pines Road, La Jolla, Calif., 92037. pBS contains an ampicillin resistance gene and pBK contains a neomycin resistance gene. Both can be transformed into E. coli strain XL-1 Blue, also available from Stratagene. pBS comes in 4 forms SK+, SK−, KS+ and KS. The S and K refers to the orientation of the polylinker to the T7 and T3 primer sequences which flank the polylinker region (“S” is for SacI and “K” is for KpnI which are the first sites on each respective end of the linker). “+” or “−” refer to the orientation of the f1 origin of replication (“ori”), such that in one orientation, single stranded rescue initiated from the f1 ori generates sense strand DNA and in the other, antisense.

[0827] Vectors pSportl, pCMVSport 2.0 and pCMVSport 3.0, were obtained from Life Technologies, Inc., P. 0. Box 6009, Gaithersburg, Md. 20897. All Sport vectors contain an ampicillin resistance gene and may be transformed into E. coli strain DH10B, also available from Life Technologies. (See, for instance, Gruber, C. E., et al., Focus 15:59 (1993).) Vector lafmid BA (Bento Soares, Columbia University, NY) contains an ampicillin resistance gene and can be transformed into E. coli strain XL-1 Blue. Vector pCR®2.1, which is available from Invitrogen, 1600 Faraday Avenue, Carlsbad, Calif. 92008, contains an ampicillin resistance gene and may be transformed into E. coli strain DH10B, available from Life Technologies. (See, for instance, Clark, J. M., Nuc. Acids Res. 16:9677-9686 (1988) and Mead, D. et al., Bio/Technology 9: (1991).) Preferably, a polynucleotide of the present invention does not comprise the phage vector sequences identified for the particular clone in Table 5, as well as the corresponding plasmid vector sequences designated above.

[0828] The deposited material in the sample assigned the ATCC Deposit Number cited by reference to Table 2 and 5 for any given cDNA clone also may contain one or more additional plasmids, each comprising a cDNA clone different from that given clone. Thus, deposits sharing the same ATCC Deposit Number contain at least a plasmid for each cDNA clone referenced in Table 1.

TABLE 5

| | | | ATCC |
|---|---|---|---|
| Libraries owned by Catalog | Catalog Description | Vector | Deposit |
| HUKA HUKB HUKC HUKD HUKE | Human Uterine Cancer | Lambda ZAP II | LP01 |
| HUKF HUKG | | | |
| HCNA HCNB | Human Colon | Lambda Zap II | LP01 |
| HFFA | Human Fetal Brain, random primed | Lambda Zap II | LP01 |
| HTWA | Resting T-Cell | Lambda ZAP II | LP01 |
| HBQA | Early Stage Human Brain, random | Lambda ZAP II | LP01 |
| | primed | | |
| HLMB HLMF HLMG HLMH HLMI | breast lymph node CDNA library | Lambda ZAP II | LP01 |
| HLMJ HLMM HLMN | | | |
| HCQA HCQB | human colon cancer | Lambda ZAP II | LP01 |
| HMEA HMEC HMED HMEE HMEF | Human Microvascular Endothelial Cells, | Lambda ZAP II | LP01 |
| HMEG HMEI HMEJ HMEK HMEL | fract. A | | |
| HUSA HUSC | Human Umbilical Vein Endothelial | Lambda ZAP II | LP01 |
| | Cells, fract. A | | |
| HLQA HLQB | Hepatocellular Tumor | Lambda ZAP II | LP01 |
| HHGA HHGB HHGC HHGD | Hemangiopericytoma | Lambda ZAP II | LP01 |
| HSDM | Human Striatum Depression, re-rescue | Lambda ZAP II | LP01 |
| HUSH | H Umbilical Vein Endothelial Cells, frac | Lambda ZAP II | LP01 |
| | A, re-excision | | |
| HSGS | Salivary gland, subtracted | Lambda ZAP II | LP01 |
| HFXA HFXB HFXC HFXD HFXE | Brain frontal cortex | Lambda ZAP II | LP01 |
| HFXF HFXG HFXH | | | |
| HPQA HPQB HPQC | PERM TF274 | Lambda ZAP II | LP01 |
| HFXJ HFXK | Brain Frontal Cortex, re-excision | Lambda ZAP II | LP01 |
| HCWA HCWB HCWC HCWD | CD34 positive cells (Cord Blood) | ZAP Express | LP02 |
| HCWE HCWF HCWG HCWH | | | |
| HCWI HCWJ HCWK | | | |
| HCUA HCUB HCUC | CD34 depleted Buffy Coat (Cord Blood) | ZAP Express | LP02 |
| HRSM | A-14 cell line | ZAP Express | LP02 |
| HRSA | A1-CELL LINE | ZAP Express | LP02 |
| HCUD HCUE HCUF HCUG HCUH | CD34 depleted Buffy Coat (Cord | ZAP Express | LP02 |
| HCUI | Blood), re-excision | | |
| HBXE HBXF HBXG | H. Whole Brain #2, re-excision | ZAP Express | LP02 |
| HRLM | L8 cell line | ZAP Express | LP02 |
| HBXA HBXB HBXC HBXD | Human Whole Brain #2 - Oligo dT > | ZAP Express | LP02 |
| | 1.5 Kb | | |
| HUDA HUDB HUDC | Testes | ZAP Express | LP02 |
| HHTM HHTN HHTO | H. hypothalamus, frac A;re-excision | ZAP Express | LP02 |
| HHTL | H. hypothalamus, frac A | ZAP Express | LP02 |
| HASA HASD | Human Adult Spleen | Uni-ZAP XR | LP03 |
| HFKC HFKD HFKE HFKF HFKG | Human Fetal Kidney | Uni-ZAP XR | LP03 |
| HE8A HE8B HE8C HE8D HE8E | Human 8 Week Whole Embryo | Uni-ZAP XR | LP03 |
| HE8F HE8M HE8N | | | |
| HGBA HGBD HGBE HGBF HGBG | Human Gall Bladder | Uni-ZAP XR | LP03 |
| HGBH HGBI | | | |
| HLHA HLHB HLHC HLHD HLHE | Human Fetal Lung III | Uni-ZAP XR | LP03 |
| HLHF HLHG HLHH HLHQ | | | |
| HPMA HPMB HPMC HPMD HPME | Human Placenta | Uni-ZAP XR | LP03 |
| HPMF HPMG HPMH | | | |
| HPRA HPRB HPRC HPRD | Human Prostate | Uni-ZAP XR | LP03 |
| HSIA HSIC HSID HSIE | Human Adult Small Intestine | Uni-ZAP XR | LP03 |
| HTEA HTEB HTEC HTED HTEE | Human Testes | Uni-ZAP XR | LP03 |
| HTEF HTEG HTEH HTEI HTEJ | | | |
| HTEK | | | |
| HTPA HTPB HTPC HTPD HTPE | Human Pancreas Tumor | Uni-ZAP XR | LP03 |
| HTTA HTTB HTTC HTTD HTTE | Human Testes Tumor | Uni-ZAP XR | LP03 |
| HTTF | | | |
| HAPA HAPB HAPC HAPM | Human Adult Pulmonary | Uni-ZAP XR | LP03 |
| HETA HETB HETC HETD HETE | Human Endometrial Tumor | Uni-ZAP XR | LP03 |
| HETF HETG HETH HETI | | | |
| HHFB HHFC HHFD HHFE HHFF | Human Fetal Heart | Uni-ZAP XR | LP03 |
| HHFG HHFH HHFI | | | |
| HHPB HHPC HHPD HHPE HHPF | Human Hippocampus | Uni-ZAP XR | LP03 |
| HHPG HHPH | | | |
| HCE1 HCE2 HCE3 HCE4 HCE5 | Human Cerebellum | Uni-ZAP XR | LP03 |
| HCEB HCEC HCED HCEE HCEF | | | |
| HCEG | | | |
| HUVB HUVC HUVD HUVE | Human Umbilical Vein, Endo. remake | Uni-ZAP XR | LP03 |
| HSTA HSTB HSTC HSTD | Human Skin Tumor | Uni-ZAP XR | LP03 |
| HTAA HTAB HTAC HTAD HTAE | Human Activated T-Cells | Uni-ZAP XR | LP03 |
| HFEA HFEB HFEC | Human Fetal Epithelium (Skin) | Uni-ZAP XR | LP03 |
| HJPA HJPB HJPC HJPD | HUMAN JURKAT MEMBRANE | Uni-ZAP XR | LP03 |
| | BOUND POLYSOMES | | |
| HESA | Human epithelioid sarcoma | Uni-Zap XR | LP03 |
| HLTA HLTB HLTC HLTD HLTE | Human T-Cell Lymphoma | Uni-ZAP XR | LP03 |
| HLTF | | | |
| HFTA HFTB HFTC HFTD | Human Fetal Dura Mater | Uni-ZAP XR | LP03 |
| HRDA HRDB HRDC HRDD HRDE | Human Rhabdomyosarcoma | Uni-ZAP XR | LP03 |
| HRDF | | | |
| HCAA HCAB HCAC | Cem cells cyclohexamide treated | Uni-ZAP XR | LP03 |
| HRGA HRGB HRGC HRGD | Raji Cells, cyclohexamide treated | Uni-ZAP XR | LP03 |
| HSUA HSUB HSUC HSUM | Supt Cells, cyclohexamide treated | Uni-ZAP XR | LP03 |
| HT4A HT4C HT4D | Activated T-Cells, 12 hrs. | Uni-ZAP XR | LP03 |
| HE9A HE9B HE9C HE9D HE9E | Nine Week Old Early Stage Human | Uni-ZAP XR | LP03 |
| HE9F HE9G HE9H HE9M HE9N | | | |
| HATA HATB HATC HATD HATE | Human Adrenal Gland Tumor | Uni-ZAP XR | LP03 |
| HT5A | Activated T-Cells, 24 hrs. | Uni-ZAP XR | LP03 |
| HFGA HFGM | Human Fetal Brain | Uni-ZAP XR | LP03 |
| HNEA HNEB HNEC HNED HNEE | Human Neutrophil | Uni-ZAP XR | LP03 |
| HBGB HBGD | Human Primary Breast Cancer | Uni-ZAP XR | LP03 |
| HBNA HBNB | Human Normal Breast | Uni-ZAP XR | LP03 |
| HCAS | Cem Cells, cyclohexamide treated, | Uni-ZAP XR | LP03 |
| | subtra | | |
| HHPS | Human Hippocampus, subtracted | pBS | LP03 |
| HKCS HKCU | Human Colon Cancer, subtracted | pBS | LP03 |
| HRGS | Raji cells, cyclohexamide treated, | pBS | LP03 |
| | subtracted | | |
| HSUT | Supt cells, cyclohexamide treated, | pBS | LP03 |
| | differentially expressed | | |
| HT4S | Activated T-Cells, 12 hrs, subtracted | Uni-ZAP XR | LP03 |
| HCDA HCDB HCDC HCDD HCDE | Human Chondrosarcoma | Uni-ZAP XR | LP03 |
| HOAA HOAB HOAC | Human Osteosarcoma | Uni-ZAP XR | LP03 |
| HTLA HTLB HTLC HTLD HTLE | Human adult testis, large inserts | Uni-ZAP XR | LP03 |
| HTLF | | | |
| HLMA HLMC HLMD | Breast Lymph node cDNA library | Uni-ZAP XR | LP03 |
| H6EA H6EB H6EC | HL-60, PMA 4H | Uni-ZAP XR | LP03 |
| HTXA HTXB HTXC HTXD HTXE | Activated T-Cell (12hs)/Thiouridine | Uni-ZAP XR | LP03 |
| HTXF HTXG HTXH | labelledEco | | |
| HNFA HNFB HNFC HNFD HNFE | Human Neutrophil, Activated | Uni-ZAP XR | LP03 |
| HNFF HNFG HNFH HNFJ | | | |
| HTOB HTOC | HUMAN TONSILS, FRACTION 2 | Uni-ZAP XR | LP03 |
| HMGB | Human OB MG63 control fraction I | Uni-ZAP XR | LP03 |
| HOPB | Human OB HOS control fraction I | Uni-ZAP XR | LP03 |
| HORB | Human OB HOS treated (10 nM E2) | Uni-ZAP XR | LP03 |
| | fraction I | | |
| HSVA HSVB HSVC | Human Chronic Synovitis | Uni-ZAP XR | LP03 |
| HROA | HUMAN STOMACH | Uni-ZAP XR | LP03 |
| HBJA HBJB HBJC HBJD HBJE | HUMAN B CELL LYMPHOMA | Uni-ZAP XR | LP03 |
| HBJF HBJG HBJH HBJI HBJJ HBJK | | | |
| HCRA HCRB HCRC | human corpus colosum | Uni-ZAP XR | LP03 |
| HODA HODB HODC HODD | human ovarian cancer | Uni-ZAP XR | LP03 |
| HDSA | Dermatofibrosarcoma Protuberance | Uni-ZAP XR | LP03 |
| HMWA HMWB HMWC HMWD | Bone Marrow Cell Line (RS4;11) | Uni-ZAP XR | LP03 |
| HMWE HMWF HMWG HMWH | | | |
| HMWI HMWJ | | | |
| HSOA | stomach cancer (human) | Uni-ZAP XR | LP03 |
| HERA | SKIN | Uni-ZAP XR | LP03 |
| HMDA | Brain-medulloblastoma | Uni-ZAP XR | LP03 |
| HGLA HGLB HGLD | Glioblastoma | Uni-ZAP XR | LP03 |
| HEAA | H. Atrophic Endometrium | Uni-ZAP XR | LP03 |
| HBCA HBCB | H. Lymph node breast Cancer | Uni-ZAP XR | LP03 |
| HPWT | Human Prostate BPH, re-excision | Uni-ZAP XR | LP03 |
| HFVG HFVH HFVI | Fetal Liver, subtraction II | pBS | LP03 |
| HNFI | Human Neutrophils, Activated, re- | pBS | LP03 |
| | excision | | |
| HBMB HBMC HBMD | Human Bone Marrow, re-excision | pBS | LP03 |
| HKML HKMM HKMN | H. Kidney Medulla, re-excision | pBS | LP03 |
| HKIX HKIY | H. Kidney Cortex, subtracted | pBS | LP03 |
| HADT | H. Amygdala Depression, subtracted | pBS | LP03 |
| H6AS | Hl-60, untreated, subtracted | Uni-ZAP XR | LP03 |
| H6ES | HL-60, PMA 4H, subtracted | Uni-ZAP XR | LP03 |
| H6BS | HL-60, RA 4h, Subtracted | Uni-ZAP XR | LP03 |
| H6CS | HL-60, PMA 1d, subtracted | Uni-ZAP XR | LP03 |
| HTXJ HTXK | Activated T-cell(12h)/Thiouridine-re- | Uni-ZAP XR | LP03 |
| | excision | | |
| HMSA HMSB HMSC HMSD HMSE | Monocyte activated | Uni-ZAP XR | LP03 |
| HMSF HMSG HMSH HMSI HMSJ | | | |
| HMSK | | | |
| HAGA HAGB HAGC HAGD HAGE | Human Amygdala | Uni-ZAP XR | LP03 |
| HAGF | | | |
| HSRA HSRB HSRE | STROMAL-OSTEOCLASTOMA | Uni-ZAP XR | LP03 |
| HSRD HSRF HSRG HSRH | Human Osteoclastoma Stromal Cells - | Uni-ZAP XR | LP03 |
| | unamplified | | |
| HSQA HSQB HSQC HSQD HSQE | Stromal cell TF274 | Uni-ZAP XR | LP03 |
| HSQF HSQG | | | |
| HSKA HSKB HSKC HSKD HSKE | Smooth muscle, serum treated | Uni-ZAP XR | LP03 |
| HSKF HSKZ | | | |
| HSLA HSLB HSLC HSLD HSLE | Smooth muscle,control | Uni-ZAP XR | LP03 |
| HSLF HSLG | | | |
| HSDA HSDD HSDE HSDF HSDG | Spinal cord | Uni-ZAP XR | LP03 |
| HSDH | | | |
| HPWS | Prostate-BPH subtracted II | pBS | LP03 |
| HSKW HSKX HSKY | Smooth Muscle- HASTE normalized | pBS | LP03 |
| HFPB HFPC HFPD | H. Frontal cortex,epileptic;re-excision | Uni-ZAP XR | LP03 |
| HSDI HSDJ HSDK | Spinal Cord, re-excision | Uni-ZAP XR | LP03 |
| HSKN HSKO | Smooth Muscle Serum Treated, Norm | pBS | LP03 |
| HSKG HSKH HSKI | Smooth muscle, serum induced,re-exc | pBS | LP03 |
| HFCA HFCB HFCC HFCD HFCE | Human Fetal Brain | Uni-ZAP XR | LP04 |
| HFCF | | | |
| HPTA HPTB HPTD | Human Pituitary | Uni-ZAP XR | LP04 |
| HTHB HTHC HTHD | Human Thymus | Uni-ZAP XR | LP04 |
| HE6B HE6C HE6D HE6E HE6F | Human Whole Six Week Old Embryo | Uni-ZAP XR | LP04 |
| HE6G HE6S | | | |
| HSSA HSSB HSSC HSSD HSSE | Human Synovial Sarcoma | Uni-ZAP XR | LP04 |
| HSSF HSSG HSSH HSSI HSSJ | | | |
| HSSK | | | |
| HE7T | 7 Week Old Early Stage Human, | Uni-ZAP XR | LP04 |
| | subtracted | | |
| HEPA HEPB HEPC | Human Epididymus | Uni-ZAP XR | LP04 |
| HSNA HSNB HSNC HSNM HSNN | Human Synovium | Uni-ZAP XR | LP04 |
| HPFB HPFC HPFD HPFE | Human Prostate Cancer, Stage C fraction | Uni-ZAP XR | LP04 |
| HE2A HE2D HE2E HE2H HE2I | 12 Week Old Early Stage Human | Uni-ZAP XR | LP04 |
| HE2M HE2N HE2O | | | |
| HE2B HE2C HE2F HE2G HE2P | 12 Week Old Early Stage Human, II | Uni-ZAP XR | LP04 |
| HE2Q | | | |
| HPTS HPTT HPTU | Human Pituitary, subtracted | Uni-ZAP XR | LP04 |
| HAUA HAUB HAUC | Amniotic Cells - TNF induced | Uni-ZAP XR | LP04 |
| HAQA HAQB HAQC HAQD | Amniotic Cells - Primary Culture | Uni-ZAP XR | LP04 |
| HWTA HWTB HWTC | wilm's tumor | Uni-ZAP XR | LP04 |
| HBSD | Bone Cancer, re-excision | Uni-ZAP XR | LP04 |
| HSGB | Salivary gland, re-excision | Uni-ZAP XR | LP04 |
| HSJA HSJB HSJC | Smooth muscle-ILb induced | Uni-ZAP XR | LP04 |
| HSXA HSXB HSXC HSXD | Human Substantia Nigra | Uni-ZAP XR | LP04 |
| HSHA HSHB HSHC | Smooth muscle, IL1b induced | Uni-ZAP XR | LP04 |
| HOUA HOUB HOUC HOUD HOUE | Adipocytes | Uni-ZAP XR | LP04 |
| HPWA HPWB HPWC HPWD | Prostate BPH | Uni-ZAP XR | LP04 |
| HPWE | | | |
| HELA HELB HELC HELD HELE | Endothelial cells-control | Uni-ZAP XR | LP04 |
| HELF HELG HELH | | | |
| HEMA HEMB HEMC HEMD | Endothelial-induced | Uni-ZAP XR | LP04 |
| HEME HEMF HEMG HEMH | | | |
| HBIA HBIB HBIC | Human Brain, Striatum | Uni-ZAP XR | LP04 |
| HHSA HHSB HHSC HHSD HHSE | Human Hypothalmus,Schizophrenia | Uni-ZAP XR | LP04 |
| HNGA HNGB HNGC HNGD HNGE | neutrophils control | Uni-ZAP XR | LP04 |
| HNGF HNGG HNGH HNGI HNGJ | | | |
| HNHA HNHB HNHC HNHD HNHE | Neutrophils IL-I and LPS induced | Uni-ZAP XR | LP04 |
| HNHF HNHG HNHH HNHI HNHJ | | | |
| HSDB HSDC | STRIATUM DEPRESSION | Uni-ZAP XR | LP04 |
| HHPT | Hypothalamus | Uni-ZAP XR | LP04 |
| HSAT HSAU HSAV HSAW HSAX | Anergic T-cell | Uni-ZAP XR | LP04 |
| HSAY HSAZ | | | |
| HBMS HBMT HBMU HBMV | Bone marrow | Uni-ZAP XR | LP04 |
| HBMW HBMX | | | |
| HOEA HOEB HOEC HOED HOEE | Osteoblasts | Uni-ZAP XR | LP04 |
| HOEF HOEJ | | | |
| HAIA HAIB HAIC HAID HAIE | Epithelial-TNFa and INF induced | Uni-ZAP XR | LP04 |
| HAIF | | | |
| HTGA HTGB HTGC HTGD | Apoptotic T-cell | Uni-ZAP XR | LP04 |
| HMCA HMCB HMCC HMCD | Macrophage-oxLDL | Uni-ZAP XR | LP04 |
| HMCE | | | |
| HMAA HMAB HMAC HMAD | Macrophage (GM-CSF treated) | Uni-ZAP XR | LP04 |
| HMAE HMAF HMAG | | | |
| HPHA | Normal Prostate | Uni-ZAP XR | LP04 |
| HPIA HPIB HPIC | LNCAP prostate cell line | Uni-ZAP XR | LP04 |
| HPJA HPJB HPJC | PC3 Prostate cell line | Uni-ZAP XR | LP04 |
| HOSE HOSF HOSG | Human Osteoclastoma, re-excision | Uni-ZAP XR | LP04 |
| HTGE HTGF | Apoptotic T-cell, re-excision | Uni-ZAP XR | LP04 |
| HMAJ HMAK | H Macrophage (GM-CSF treated), re- | Uni-ZAP XR | LP04 |
| | excision | | |
| HACB HACC HACD | Human Adipose Tissue, re-excision | Uni-ZAP XR | LP04 |
| HFPA | H. Frontal Cortex, Epileptic | Uni-ZAP XR | LP04 |
| HFAA HFAB HFAC HFAD HFAE | Alzheimers, spongy change | Uni-ZAP XR | LP04 |
| HFAM | Frontal Lobe, Dementia | Uni-ZAP XR | LP04 |
| HMIA HMIB HMIC | Human Manic Depression Tissue | Uni-ZAP XR | LP04 |
| HTSA HTSE HTSF HTSG HTSH | Human Thymus | pBS | LP05 |
| HPBA HPBB HPBC HPBD HPBE | Human Pineal Gland | pBS | LP05 |
| HSAA HSAB HSAC | HSA 172 Cells | pBS | LP05 |
| HSBA HSBB HSBC HSBM | HSC172 cells | pBS | LP05 |
| HJAA HJAB HJAC HJAD | Jurkat T-cell G1 phase | pBS | LP05 |
| HJBA HJBB HJBC HJBD | Jurkat T-Cell, S phase | pBS | LP05 |
| HAFA HAFB | Aorta endothelial cells +TNF-a | pBS | LP05 |
| HAWA HAWB HAWC | Human White Adipose | pBS | LP05 |
| HTNA HTNB | Human Thyroid | pBS | LP05 |
| HONA | Normal Ovary, Premenopausal | pBS | LP05 |
| HARA HARB | Human Adult Retina | pBS | LP05 |
| HLJA HLJB | Human Lung | pCMVSport 1 | LP06 |
| HOFM HOFN HOFO | H. Ovarian Tumor, II, OV5232 | pCMVSport 2.0 | LP07 |
| HOGA HOGB HOGC | OV 10-3-95 | pCMVSport 2.0 | LP07 |
| HCGL | CD34+cells, II | pCMVSport 2.0 | LP07 |
| HDLA | Hodgkin's Lymphoma I | pCMVSport 2.0 | LP07 |
| HDTA HDTB HDTC HDTD HDTE | Hodgkin's Lymphoma II | pCMVSport 2.0 | LP07 |
| HKAA HKAB HKAC HKAD HKAE | Keratinocyte | pCMVSport2.0 | LP07 |
| HKAF HKAG HKAH | | | |
| HCIM | CAPFINDER, Crohn's Disease, lib 2 | pCMVSport 2.0 | LP07 |
| HKAL | Keratinocyte, lib 2 | pCMVSport2.0 | LP07 |
| HKAT | Keratinocyte, lib 3 | pCMVSport2.0 | LP07 |
| HNDA | Nasal polyps | pCMVSport2.0 | LP07 |
| HDRA | H. Primary Dendritic Cells,lib 3 | pCMVSport2.0 | LP07 |
| HOHA HOHB HOHC | Human Osteoblasts II | pCMVSport2.0 | LP07 |
| HLDA HLDB HLDC | Liver, Hepatoma | pCMVSport3.0 | LP08 |
| HLDN HLDO HLDP | Human Liver, normal | pCMVSport3.0 | LP08 |
| HMTA | pBMC stimulated w/ poly I/C | pCMVSport3.0 | LP08 |
| HNTA | NTERA2, control | pCMVSport3.0 | LP08 |
| HDPA HDPB HDPC HDPD HDPF | Primary Dendritic Cells, lib 1 | pCMVSport3.0 | LP08 |
| HDPG HDPH HDPI HDPJ HDPK | | | |
| HDPM HDPN HDPO HDPP | Primary Dendritic cells,frac 2 | pCMVSport3.0 | LP08 |
| HMUA HMUB HMUC | Myoloid Progenitor Cell Line | pCMVSport3.0 | LP08 |
| HHEA HHEB HHEC HHED | T Cell helper I | pCMVSport3.0 | LP08 |
| HHEM HHEN HHEO HHEP | T cell helper II | pCMVSport3.0 | LP08 |
| HEQA HEQB HEQC | Human endometrial stromal cells | pCMVSport3.0 | LP08 |
| HJMA HJMB | Human endometrial stromal cells-treated | pCMVSport3.0 | LP08 |
| | with progesterone | | |
| HSWA HSWB HSWC | Human endometrial stromal cells-treated | pCMVSport3.0 | LP08 |
| | with estradiol | | |
| HSYA HSYB HSYC | Human Thymus Stromal Cells | pCMVSport3.0 | LP08 |
| HLWA HLWB HLWC | Human Placenta | pCMVSport3.0 | LP08 |
| HRAA HRAB HRAC | Rejected Kidney, lib 4 | pCMVSport3.0 | LP08 |
| HMTM | PCR, pBMC I/C treated | PCRII | LP09 |
| HMJA | H. Meniingima, M6 | pSport 1 | LP10 |
| HMKA HMKB HMKC HMKD | H. Meningima, M1 | pSport 1 | LP10 |
| HMKE | | | |
| HUSG HUSI | Human umbilical vein endothelial cells, | pSport 1 | LP10 |
| | IL-4 induced | | |
| HUSX HUSY | Human Umbilical Vein Endothelial | pSport 1 | LP10 |
| | Cells, uninduced | | |
| HOFA | Ovarian Tumor I, OV5232 | pSport 1 | LP10 |
| HCFA HCFB HCFC HCFD | T-Cell PHA 16 hrs | pSport 1 | LP10 |
| HCFL HCFM HCFN HCFO | T-Cell PHA 24 hrs | pSport 1 | LP10 |
| HADA HADC HADD HADE HADF | Human Adipose | pSport 1 | LP10 |
| HADG | | | |
| HOVA HOVB HOVC | Human Ovary | pSport 1 | LP10 |
| HTWB HTWC HTWD HTWE | Resting T-Cell Library,II | pSport 1 | LP10 |
| HTWF | | | |
| HMMA | Spleen metastic melanoma | pSport 1 | LP10 |
| HLYA HLYB HLYC HLYD HLYE | Spleen, Chronic lymphocytic leukemia | pSport 1 | LP10 |
| HCGA | CD34+ cell, I | pSport 1 | LP10 |
| HEOM HEON | Human Eosinophils | pSport 1 | LP10 |
| HTDA | Human Tonsil, Lib 3 | pSport 1 | LP10 |
| HSPA | Salivary Gland, Lib 2 | pSport 1 | LP10 |
| HCHA HCHB HCHC | Breast Cancer cell line, MDA 36 | pSport 1 | LP10 |
| HCHM HCHN | Breast Cancer Cell line, angiogenic | pSport 1 | LP10 |
| HCIA | Crohn's Disease | pSport 1 | LP10 |
| HDAA HDAB HDAC | HEL cell line | pSport 1 | LP10 |
| HABA | Human Astrocyte | pSport 1 | LP10 |
| HUFA HUFB HUFC | Ulcerative Colitis | pSport 1 | LP10 |
| HNTM | NTERA2 + retinoic acid, 14 days | pSport 1 | LP10 |
| HDQA | Primary Dendritic cells,CapFinder2, frac | pSport 1 | LP10 |
| | 1 | | |
| HDQM | Primary Dendritic Cells, CapFinder, frac | pSport 1 | LP10 |
| | 2 | | |
| HLDX | Human Liver, normal,CapFinder□□□□ | pSport 1 | LP10 |
| HULA HULB HULC | Human Dermal Endothelial | pSport1 | LP10 |
| | Cells,untreated | | |
| HUMA | Human Dermal Endothelial cells,treated | pSport1 | LP10 |
| HCJA | Human Stromal Endometrial fibroblasts, | pSport1 | LP10 |
| | untreated | | |
| HCJM | Human Stromal endometrial fibroblasts, | pSport1 | LP10 |
| | treated w/ estradiol | | |
| HEDA | Human Stromal endometrial fibroblasts, | pSport1 | LP10 |
| | treated with progesterone | | |
| HFNA | Human ovary tumor cell OV350721 | pSport1 | LP10 |
| HKGA HKGB HKGC HKGD | Merkel Cells | pSport1 | LP10 |
| HISA HISB HISC | Pancreas Islet Cell Tumor | pSport1 | LP10 |
| HLSA | Skin, burned | pSport1 | LP10 |
| HBZA | Prostate,BPH, Lib 2 | pSport 1 | LP10 |
| HBZS | Prostate BPH,Lib 2, subtracted | pSport 1 | LP10 |
| HFIA HFIB HFIC | Synovial Fibroblasts (control) | pSport 1 | LP10 |
| HFIH HFII HFIJ | Synovial hypoxia | pSport 1 | LP10 |
| HFIT HFIU HFIV | Synovial IL-1/TNF stimulated | pSport 1 | LP10 |
| HGCA | Messangial cell, frac 1 | pSport1 | LP10 |
| HMVA HMVB HMVC | Bone Marrow Stromal Cell, untreated | pSport1 | LP10 |
| HFIX HFIY HFIZ | Synovial Fibroblasts (II1/TNF), subt | pSport1 | LP10 |
| HFOX HFOY HFOZ | Synovial hypoxia-RSF subtracted | pSport1 | LP10 |
| HMQA HMQB HMQC HMQD | Human Activated Monocytes | Uni-ZAP XR | LP11 |
| HLIA HLIB HLIG | Human Liver | pCMVSport 1 | LP012 |
| HHBA HHBB HHBC HHBD HHBE | Human Heart | pCMVSport 1 | LP012 |
| HBBA HBBB | Human Brain | pCMVSport 1 | LP012 |
| HLJA HLJB HLJC HLJD HLJE | Human Lung | pCMVSport 1 | LP012 |
| HOGA HOGB HOGC | Ovarian Tumor | pCMVSport 2.0 | LP012 |
| HTJM | Human Tonsils, Lib 2 | pCMVSport 2.0 | LP012 |
| HAMF HAMG | KMH2 | pCMVSport 3.0 | LP012 |
| HAJA HAJB HAJC | L428 | pCMVSport 3.0 | LP012 |
| HWBA HWBB HWBC HWBD | Dendritic cells, pooled | pCMVSport 3.0 | LP012 |
| HWBE | | | |
| HWAA HWAB HWAC HWAD | Human Bone Marrow, treated | pCMVSport 3.0 | LP012 |
| HWAE | | | |
| HYAA HYAB HYAC | B Cell lymphoma | pCMVSport 3.0 | LP012 |
| HWHG HWHH HWHI | Healing groin wound, 6.5 hours post | pCMVSport 3.0 | LP012 |
| | incision | | |
| HWHP HWHQ HWHR | Healing groin wound; 7.5 hours post | pCMVSport 3.0 | LP012 |
| | incision | | |
| HARM | Healing groin wound - zero hr post- | pCMVSport 3.0 | LP012 |
| | incision (control) | | |
| HBIM | Olfactory epithelium; nasalcavity | pCMVSport 3.0 | LP012 |
| HWDA | Healing Abdomen wound; 70&90 min | pCMVSport 3.0 | LP012 |
| | post incision | | |
| HWEA | Healing Abdomen Wound;15 days post | pCMVSport 3.0 | LP012 |
| | incision | | |
| HWJA | Healing Abdomen Wound;21&29 days | pCMVSport 3.0 | LP012 |
| HNAL | Human Tongue, frac 2 | pSport1 | LP012 |
| HMJA | H. Meniingima, M6 | pSport1 | LP012 |
| HMKA HMKB HMKC HMKD | H. Meningima, M1 | pSport1 | LP012 |
| HMKE | | | |
| HOFA | Ovarian Tumor I, OV5232 | pSport1 | LP012 |
| HCFA HCFB HCFC HCFD | T-Cell PHA 16 hrs | pSport1 | LP012 |
| HCFL HCFM HCFN HCFO | T-Cell PHA 24 hrs | pSport1 | LP012 |
| HMMA HMMB HMMC | Spleen metastic melanoma | pSport1 | LP012 |
| HTDA | Human Tonsil, Lib 3 | pSport1 | LP012 |
| HDBA | Human Fetal Thymus | pSport1 | LP012 |
| HDUA | Pericardium | pSport1 | LP012 |
| HBZA | Prostate,BPH, Lib 2 | pSport1 | LP012 |
| HWCA | Larynx tumor | pSport1 | LP012 |
| HWKA | Normal lung | pSport1 | LP012 |
| HSMB | Bone marrow stroma,treated | pSport1 | LP012 |
| HBHM | Normal trachea | pSport1 | LP012 |
| HLFC | Human Larynx | pSport1 | LP012 |
| HLRB | Siebben Polyposis | pSport1 | LP012 |
| HNIA | Mammary Gland | pSport1 | LP012 |
| HNJB | Palate carcinoma | pSport1 | LP012 |
| HNKA | Palate normal | pSport1 | LP012 |
| HMZA | Pharynx carcinoma | pSport1 | LP012 |
| HABG | Cheek Carcinoma | pSport1 | LP012 |
| HMZM | Pharynx Carcinoma | pSport1 | LP012 |
| HDRM | Larynx Carcinoma | pSport1 | LP012 |
| HVAA | Pancreas normal PCA4 No | pSport1 | LP012 |
| HICA | Tongue carcinoma | pSport1 | LP012 |
| HUKA HUKB HUKC HUKD HUKE | Human Uterine Cancer | Lambda ZAP II | LP013 |
| HFFA | Human Fetal Brain, random primed | Lambda ZAP II | LP013 |
| HTUA | Activated T-cell labeled with 4-thioluri | Lambda ZAP II | LP013 |
| HBQA | Early Stage Human Brain, random | Lambda ZAP II | LP013 |
| | primed | | |
| HMEB | Human microvascular Endothelial cells, | Lambda ZAP II | LP013 |
| | fract. B | | |
| HUSH | Human Umbilical Vein Endothelial | Lambda ZAP II | LP013 |
| | cells, fract. A, re-excision | | |
| HLQC HLQD | Hepatocellular tumor, re-excision | Lambda ZAP II | LP013 |
| HTWJ HTWK HTWL | Resting T-cell, re-excision | Lambda ZAP II | LP013 |
| HF6S | Human Whole 6 week Old Embryo (II), | pBluescript | LP013 |
| | subt | | |
| HHPS | Human Hippocampus, subtracted | pBluescript | LP013 |
| HL1S | LNCAP, differential expression | pBluescript | LP013 |
| HLHS HLHT | Early Stage Human Lung, Subtracted | pBluescript | LP013 |
| HSUS | Supt cells, cyclohexamide treated, | pBluescript | LP013 |
| | subtracted | | |
| HSUT | Supt cells, cyclohexamide treated, | pBluescript | LP013 |
| | differentially expressed | | |
| HSDS | H. Striatum Depression, subtracted | pBluescript | LP013 |
| HPTZ | Human Pituitary, Subtracted VII | pBluescript | LP013 |
| HSDX | H. Striatum Depression, subt II | pBluescript | LP013 |
| HSDZ | H. Striatum Depression, subt | pBluescript | LP013 |
| HPBA HPBB HPBC HPBD HPBE | Human Pineal Gland | pBluescript SK- | LP013 |
| HRTA | Colorectal Tumor | pBluescript SK- | LP013 |
| HSBA HSBB HSBC HSBM | HSC172 cells | pBluescript SK- | LP013 |
| HJAA HJAB HJAC HJAD | Jurkat T-cell G1 phase | pBluescript SK- | LP013 |
| HJBA HJBB HJBC HJBD | Jurkat T-cell, S1 phase | pBluescript SK- | LP013 |
| HTNA HTNB | Human Thyroid | pBluescript SK- | LP013 |
| HAHA HAHB | Human Adult Heart | Uni-ZAP XR | LP013 |
| HE6A | Whole 6 week Old Embryo | Uni-ZAP XR | LP013 |
| HFCA HFCB HFCC HFCD HFCE | Human Fetal Brain | Uni-ZAP XR | LP013 |
| HFKC HFKD HFKE HFKF HFKG | Human Fetal Kidney | Uni-ZAP XR | LP013 |
| HGBA HGBD HGBE HGBF HGBG | Human Gall Bladder | Uni-ZAP XR | LP013 |
| HPRA HPRB HPRC HPRD | Human Prostate | Uni-ZAP XR | LP013 |
| HTEA HTEB HTEC HTED HTEE | Human Testes | Uni-ZAP XR | LP013 |
| HTTA HTTB HTTC HTTD HTTE | Human Testes Tumor | Uni-ZAP XR | LP013 |
| HYBA HYBB | Human Fetal Bone | Uni-ZAP XR | LP013 |
| HFLA | Human Fetal Liver | Uni-ZAP XR | LP013 |
| HHFB HHFC HHFD HHFE HHFF | Human Fetal Heart | Uni-ZAP XR | LP013 |
| HUVB HUVC HUVD HUVE | Human Umbilical Vein, End. remake | Uni-ZAP XR | LP013 |
| HTHB HTHC HTHD | Human Thymus | Uni-ZAP XR | LP013 |
| HSTA HSTB HSTC HSTD | Human Skin Tumor | Uni-ZAP XR | LP013 |
| HTAA HTAB HTAC HTAD HTAE | Human Activated T-cells | Uni-ZAP XR | LP013 |
| HFEA HFEB HFEC | Human Fetal Epithelium (skin) | Uni-ZAP XR | LP013 |
| HJPA HJPB HJPC HJPD | Human Jurkat Membrane Bound | Uni-ZAP XR | LP013 |
| | Polysomes | | |
| HESA | Human Epithelioid Sarcoma | Uni-ZAP XR | LP013 |
| HALS | Human Adult Liver, Subtracted | Uni-ZAP XR | LP013 |
| HFTA HFTB HFTC HFTD | Human Fetal Dura Mater | Uni-ZAP XR | LP013 |
| HCAA HCAB HCAC | Cem cells, cyclohexamide treated | Uni-ZAP XR | LP013 |
| HRGA HRGB HRGC HRGD | Raji Cells, cyclohexamide treated | Uni-ZAP XR | LP013 |
| HE9A HE9B HE9C HE9D HE9E | Nine Week Old Early Stage Human | Uni-ZAP XR | LP013 |
| HSFA | Human Fibrosarcoma | Uni-ZAP XR | LP013 |
| HATA HATB HATC HATD HATE | Human Adrenal Gland Tumor | Uni-ZAP XR | LP013 |
| HTRA | Human Trachea Tumor | Uni-ZAP XR | LP013 |
| HE2A HE2D HE2E HE2H HE2I | 12 Week Old Early Stage Human | Uni-ZAP XR | LP013 |
| HE2B HE2C HE2F HE2G HE2P | 12 Week Old Early Stage Human, II | Uni-ZAP XR | LP013 |
| HNEA HNEB HNEC HNED HNEE | Human Neutrophil | Uni-ZAP XR | LP013 |
| HBGA | Human Primary Breast Cancer | Uni-ZAP XR | LP013 |
| HPTS HPTT HPTU | Human Pituitary, subtracted | Uni-ZAP XR | LP013 |
| HMQA HMQB HMQC HMQD | Human Activated Monocytes | Uni-ZAP XR | LP013 |
| HOAA HOAB HOAC | Human Osteosarcoma | Uni-ZAP XR | LP013 |
| HTOA HTOD HTOE HTOF HTOG | Human tonsils | Uni-ZAP XR | LP013 |
| HMGB | Human OB MG63 control fraction I | Uni-ZAP XR | LP013 |
| HOPB | Human OB HOS control fraction I | Uni-ZAP XR | LP013 |
| HOQB | Human OB HOS treated (1 nM E2) | Uni-ZAP XR | LP013 |
| | fraction I | | |
| HAUA HAUB HAUC | Amniotic Cells - TNF induced | Uni-ZAP XR | LP013 |
| HAQA HAQB HAQC HAQD | Amniotic Cells - Primary Culture | Uni-ZAP XR | LP013 |
| HROA HROC | HUMAN STOMACH | Uni-ZAP XR | LP013 |
| HBJA HBJB HBJC HBJD HBJE | HUMAN B CELL LYMPHOMA | Uni-ZAP XR | LP013 |
| HODA HODB HODC HODD | human ovarian cancer | Uni-ZAP XR | LP013 |
| HCPA | Corpus Callosum | Uni-ZAP XR | LP013 |
| HSOA | stomach cancer (human) | Uni-ZAP XR | LP013 |
| HERA | SKIN | Uni-ZAP XR | LP013 |
| HMDA | Brain-medulloblastoma | Uni-ZAP XR | LP013 |
| HGLA HGLB HGLD | Glioblastoma | Uni-ZAP XR | LP013 |
| HWTA HWTB HWTC | wilm's tumor | Uni-ZAP XR | LP013 |
| HEAA | H. Atrophic Endometrium | Uni-ZAP XR | LP013 |
| HAPN HAPO HAPP HAPQ HAPR | Human Adult Pulmonary;re-excision | Uni-ZAP XR | LP013 |
| HLTG HLTH | Human T-cell lymphoma;re-excision | Uni-ZAP XR | LP013 |
| HAHC HAHD HAHE | Human Adult Heart;re-excision | Uni-ZAP XR | LP013 |
| HAGA HAGB HAGC HAGD HAGE | Human Amygdala | Uni-ZAP XR | LP013 |
| HSJA HSJB HSJC | Smooth muscle-ILb induced | Uni-ZAP XR | LP013 |
| HSHA HSHB HSHC | Smooth muscle, IL1b induced | Uni-ZAP XR | LP013 |
| HPWA HPWB HPWC HPWD | Prostate BPH | Uni-ZAP XR | LP013 |
| HPWE | | | |
| HPIA HPIB HPIC | LNCAP prostate cell line | Uni-ZAP XR | LP013 |
| HPJA HPJB HPJC | PC3 Prostate cell line | Uni-ZAP XR | LP013 |
| HBTA | Bone Marrow Stroma, TNF&LPS ind | Uni-ZAP XR | LP013 |
| HMCF HMCG HMCH HMCI HMCJ | Macrophage-oxLDL; re-excision | Uni-ZAP XR | LP013 |
| HAGG HAGH HAGI | Human Amygdala;re-excision | Uni-ZAP XR | LP013 |
| HACA | H. Adipose Tissue | Uni-ZAP XR | LP013 |
| HKFB | K562 + PMA (36 hrs),re-excision | ZAP Express | LP013 |
| HCWT HCWU HCWV | CD34 positive cells (cord blood),re-ex | ZAP Express | LP013 |
| HBWA | Whole brain | ZAP Express | LP013 |
| HBXA HBXB HBXC HBXD | Human Whole Brain #2 - Oligo dT > | ZAP Express | LP013 |
| | 1.5 Kb | | |
| HAVM | Temporal cortex-Alzheizmer | pT-Adv | LP014 |
| HAVT | Hippocampus, Alzheimer Subtracted | pT-Adv | LP014 |
| HHAS | CHME Cell Line | Uni-ZAP XR | LP014 |
| HAJR | Larynx normal | pSport 1 | LP014 |
| HWLE HWLF HWLG HWLH | Colon Normal | pSport 1 | LP014 |
| HCRM HCRN HCRO | Colon Carcinoma | pSport 1 | LP014 |
| HWLI HWLJ HWLK | Colon Normal | pSport 1 | LP014 |
| HWLQ HWLR HWLS HWLT | Colon Tumor | pSport 1 | LP014 |
| HBFM | Gastrocnemius Muscle | pSport 1 | LP014 |
| HBOD HBOE | Quadriceps Muscle | pSport 1 | LP014 |
| HBKD HBKE | Soleus Muscle | pSport 1 | LP014 |
| HCCM | Pancreatic Langerhans | pSport 1 | LP014 |
| HWGA | Larynx carcinoma | pSport 1 | LP014 |
| HWGM HWGN | Larynx carcinoma | pSport 1 | LP014 |
| HWLA HWLB HWLC | Normal colon | pSport 1 | LP014 |
| HWLM HWLN | Colon Tumor | pSport 1 | LP014 |
| HVAM HVAN HVAO | Pancreas Tumor | pSport 1 | LP014 |
| HWGQ | Larynx carcinoma | pSport 1 | LP014 |
| HAQM HAQN | Salivary Gland | pSport 1 | LP014 |
| HASM | Stomach; normal | pSport 1 | LP014 |
| HBCM | Uterus; normal | pSport 1 | LP014 |
| HCDM | Testis; normal | pSport 1 | LP014 |
| HDJM | Brain; normal | pSport 1 | LP014 |
| HEFM | Adrenal Gland,normal | pSport 1 | LP014 |
| HBAA | Rectum normal | pSport 1 | LP014 |
| HFDM | Rectum tumour | pSport 1 | LP014 |
| HGAM | Colon, normal | pSport 1 | LP014 |
| HHMM | Colon, tumour | pSport 1 | LP014 |
| HCLB HCLC | Human Lung Cancer | Lambda Zap II | LP015 |
| HRLA | L1 Cell line | ZAP Express | LP015 |
| HHAM | Hypothalamus, Alzheimer's | pCMVSport 3.0 | LP015 |
| HKBA | Ku 812F Basophils Line | pSport 1 | LP015 |
| HS2S | Saos2, Dexamethosome Treated | pSport 1 | LP016 |
| HA5A | Lung Carcinoma A549 TNFalpha | pSport 1 | LP016 |
| | activated | | |
| HTFM | TF-1 Cell Line GM-CSF Treated | pSport 1 | LP016 |
| HYAS | Thyroid Tumour | pSport 1 | LP016 |
| HUTS | Larynx Normal | pSport 1 | LP016 |
| HXOA | Larynx Tumor | pSport 1 | LP016 |
| HEAH | Ea.hy.926 cell line | pSport 1 | LP016 |
| HINA | Adenocarcinoma Human | pSport 1 | LP016 |
| HRMA | Lung Mesothelium | pSport 1 | LP016 |
| HLCL | Human Pre-Differentiated Adipocytes | Uni-Zap XR | LP017 |
| HS2A | Saos2 Cells | pSport 1 | LP020 |
| HS2I | Saos2 Cells; Vitamin D3 Treated | pSport 1 | LP020 |
| HUCM | CHME Cell Line, untreated | pSport 1 | LP020 |
| HEPN | Aryepiglottis Normal | pSport 1 | LP020 |
| HPSN | Sinus Piniformis Tumour | pSport 1 | LP020 |
| HNSA | Stomach Normal | pSport 1 | LP020 |
| HNSM | Stomach Tumour | pSport 1 | LP020 |
| HNLA | Liver Normal Met5No | pSport 1 | LP020 |
| HUTA | Liver Tumour Met 5 Tu | pSport 1 | LP020 |
| HOCN | Colon Normal | pSport 1 | LP020 |
| HOCT | Colon Tumor | pSport 1 | LP020 |
| HTNT | Tongue Tumour | pSport 1 | LP020 |
| HLXN | Larnyx Normal | pSport 1 | LP020 |
| HLXT | Larnyx Tumour | pSport 1 | LP020 |
| HTYN | Thymus | pSport 1 | LP020 |
| HPLN | Placenta | pSport 1 | LP020 |
| HTNG | Tongue Normal | pSport 1 | LP020 |
| HZAA | Thyroid Normal (SDCA2 No) | pSport 1 | LP020 |
| HWES | Thyroid Thyroiditis | pSport 1 | LP020 |
| HFHD | Ficolled Human Stromal Cells, 5Fu | pTrip1Ex2 | LP021 |
| | treated | | |
| HFHM,HFHN | Ficolled Human Stromal Cells, | pTrip1Ex2 | LP021 |
| | Untreated | | |
| HPCI | Hep G2 Cells, lambda library | lambda Zap-CMV XR | LP021 |
| HBCA,HBCB,HBCC | H. Lymph node breast Cancer | Uni-ZAP XR | LP021 |
| HCOK | Chondrocytes | pSPORT1 | LP022 |
| HDCA, HDCB, HDCC | Dendritic Cells From CD34 Cells | pSPORT1 | LP022 |
| HDMA, HDMB | CD40 activated monocyte dendritic cells | pSPORT1 | LP022 |
| HDDM, HDDN, HDDO | LPS activated derived dendritic cells | pSPORT1 | LP022 |
| HPCR | Hep G2 Cells, PCR library | lambda Zap-CMV XR | LP022 |
| HAAA, HAAB, HAAG | Lung, Cancer (4005313A3): Invasive | pSPORT1 | LP022 |
| | Poorly Differentiated Lung | | |
| | Adenocarcinoma | | |
| HIPA, HIPB, HIPC | Lung, Cancer (4005163 B7): Invasive, | pSPORT1 | LP022 |
| | Poorly Diff. Adenocarcinoma, | | |
| | Metastatic | | |
| HOOH, HOOI | Ovary, Cancer: (4004562 B6) Papillary | pSPORT1 | LP022 |
| | Serous Cystic Neoplasm, Low | | |
| | Malignant Pot | | |
| HIDA | Lung, Normal: (4005313 B1) | pSPORT1 | LP022 |
| HUJA,HUJB,HUJC,HUJD,HUJE | B-Cells | pCMVSport 3.0 | LP022 |
| HNOA,HNOB,HNOC,HNOD | Ovary, Normal: (9805C040R) | pSPORT1 | LP022 |
| HNLM | Lung, Normal: (4005313 B1) | pSPORT1 | LP022 |
| HSCL | Stromal Cells | pSPORT1 | LP022 |
| HAAX | Lung, Cancer: (4005313 A3) Invasive | pSPORT1 | LP022 |
| | Poorly-differentiated Metastatic lung | | |
| | adenocarcinoma | | |
| HUUA,HUUB,HUUC,HUUD | B-cells (unstimulated) | pTrip1Ex2 | LP022 |
| HWWA,HWWB,HWWC,HWWD,H | B-cells (stimulated) | pSPORT1 | LP022 |
| WWE,HWWF,HWWG | | | |
| HCCC | Colon, Cancer: (9808C064R) | pCMVSport 3.0 | LP023 |
| HPDO HPDP HPDQ HPDR HPD | Ovary, Cancer (9809C332): Poorly | pSport 1 | LP023 |
| | differentiated adenocarcinoma | | |
| HPCO HPCP HPCQ HPCT | Ovary, Cancer (15395A1F): Grade II | pSport 1 | LP023 |
| | Papillary Carcinoma | | |
| HOCM HOCO HOCP HOCQ | Ovary, Cancer: (15799A1F) Poorly | pSport 1 | LP023 |
| | differentiated carcinoma | | |
| HCBM HCBN HCBO | Breast, Cancer: (4004943 A5) | pSport 1 | LP023 |
| HNBT HNBU HNBV | Breast, Normal: (4005522B2) | pSport 1 | LP023 |
| HBCP HBCQ | Breast, Cancer: (4005522 A2) | pSport 1 | LP023 |
| HBCJ | Breast, Cancer: (9806C012R) | pSport 1 | LP023 |
| HSAM HSAN | Stromal cells 3.88 | pSport 1 | LP023 |
| HVCA HVCB HVCC HVCD | Ovary, Cancer: (4004332 A2) | pSport 1 | LP023 |
| HSCK HSEN HSEO | Stromal cells (HBM3.18) | pSport 1 | LP023 |
| HSCP HSCQ | stromal cell clone 2.5 | pSport 1 | LP023 |
| HUXA | Breast Cancer: (4005385 A2) | pSport 1 | LP023 |
| HCOM HCON HCOO HCOP HCOQ | Ovary, Cancer (4004650 A3): Well- | pSport 1 | LP023 |
| | Differentiated Micropapillary Serous | | |
| | Carcinoma | | |
| HBNM | Breast, Cancer: (9802C020E) | pSport 1 | LP023 |
| HVVA HVVB HVVC HVVD HVVE | Human Bone Marrow, treated | pSport 1 | LP023 |

[0829] Two approaches can be used to isolate a particular clone from the deposited sample of plasmid DNAs cited for that clone in Table 5. First, a plasmid is directly isolated by screening the clones using a polynucleotide probe corresponding to the nucleotide sequence of SEQ ID NO:X.

[0830] Particularly, a specific polynucleotide with 30-40 nucleotides is synthesized using an Applied Biosystems DNA synthesizer according to the sequence reported. The oligonucleotide is labeled, for instance, with ³²P-γ-ATP using T4 polynucleotide kinase and purified according to routine methods. (E.g., Maniatis et al., Molecular Cloning: A Laboratory Manual, Cold Spring Harbor Press, Cold Spring, N.Y. (1982).) The plasmid mixture is transformed into a suitable host, as indicated above (such as XL-1 Blue (Stratagene)) using techniques known to those of skill in the art, such as those provided by the vector supplier or in related publications or patents cited above. The transformants are plated on 1.5% agar plates (containing the appropriate selection agent, e.g., ampicillin) to a density of about 150 transformants (colonies) per plate. These plates are screened using Nylon membranes according to routine methods for bacterial colony screening (e.g., Sambrook et al., Molecular Cloning: A Laboratory Manual, 2nd Edit., (1989), Cold Spring Harbor Laboratory Press, pages 1.93 to 1.104), or other techniques known to those of skill in the art.

[0831] Alternatively, two primers of 17-20 nucleotides derived from both ends of the nucleotide sequence of SEQ ID NO:X are synthesized and used to amplify the desired cDNA using the deposited cDNA plasmid as a template. The polymerase chain reaction is carried out under routine conditions, for instance, in 25 μl of reaction mixture with 0.5 ug of the above cDNA template. A convenient reaction mixture is 1.5-5 mM MgCl₂, 0.01% (w/v) gelatin, 20 μM each of dATP, dCTP, dGTP, dTTP, 25 pmol of each primer and 0.25 Unit of Taq polymerase. Thirty five cycles of PCR (denaturation at 94° C. for 1 min; annealing at 55° C. for 1 min; elongation at 72° C. for 1 min) are performed with a Perkin- Elmer Cetus automated thermal cycler. The amplified product is analyzed by agarose gel electrophoresis and the DNA band with expected molecular weight is excised and purified. The PCR product is verified to be the selected sequence by subcloning and sequencing the DNA product.

[0832] Several methods are available for the identification of the 5′ or 3′ non-coding portions of a gene which may not be present in the deposited clone. These methods include but are not limited to, filter probing, clone enrichment using specific probes, and protocols similar or identical to 5′ and 3′ “RACE” protocols which are well known in the art. For instance, a method similar to 5′ RACE is available for generating the missing 5′ end of a desired full-length transcript. (Fromont-Racine et al., Nucleic Acids Res. 21(7):1683-1684 (1993).)

[0833] Briefly, a specific RNA oligonucleotide is ligated to the 5′ ends of a population of RNA presumably containing full-length gene RNA transcripts. A primer set containing a primer specific to the ligated RNA oligonucleotide and a primer specific to a known sequence of the gene of interest is used to PCR amplify the 5′ portion of the desired full-length gene. This amplified product may then be sequenced and used to generate the full length gene.

[0834] This above method starts with total RNA isolated from the desired source, although poly-A+ RNA can be used. The RNA preparation can then be treated with phosphatase if necessary to eliminate 5′ phosphate groups on degraded or damaged RNA which may interfere with the later RNA ligase step. The phosphatase should then be inactivated and the RNA treated with tobacco acid pyrophosphatase in order to remove the cap structure present at the 5′ ends of messenger RNAs. This reaction leaves a 5′ phosphate group at the 5′ end of the cap cleaved RNA which can then be ligated to an RNA oligonucleotide using T4 RNA ligase.

[0835] This modified RNA preparation is used as a template for first strand cDNA synthesis using a gene specific oligonucleotide. The first strand synthesis reaction is used as a template for PCR amplification of the desired 5′ end using a primer specific to the ligated RNA oligonucleotide and a primer specific to the known sequence of the gene of interest. The resultant product is then sequenced and analyzed to confirm that the 5′ end sequence belongs to the desired gene.

### Example 2

[0836] Isolation of Genomic Clones Corresponding to a Polynucleotide

[0837] A human genomic P1 library (Genomic Systems, Inc.) is screened by PCR using primers selected for the sequence corresponding to SEQ ID NO:X, according to the method described in Example 1. (See also, Sambrook.)

### Example 3

[0838] Tissue Specific Expression Analysis

[0839] The Human Genome Sciences, Inc. (HGS) database is derived from sequencing tissue specific cDNA libraries. Libraries generated from a particular tissue are selected and the specific tissue expression pattern of EST groups or assembled contigs within these libraries is determined by comparison of the expression patterns of those groups or contigs within the entire database. ESTs which show tissue specific expression are selected.

[0840] The original clone from which the specific EST sequence was generated, is obtained from the catalogued library of clones and the insert amplified by PCR using methods known in the art. The PCR product is denatured then transferred in 96 well format to a nylon membrane (Schleicher and Scheull) generating an array filter of tissue specific clones. Housekeeping genes, maize genes, and known tissue specific genes are included on the filters. These targets can be used in signal normalization and to validate assay sensitivity. Additional targets are included to monitor probe length and specificity of hybridization.

[0841] Radioactively labeled hybridization probes are generated by first strand cDNA synthesis per the manufacturer's instructions (Life Technologies) from mRNA/RNA samples prepared from the specific tissue being analyzed. The hybridization probes are purified by gel exclusion chromatography, quantitated, and hybridized with the array filters in hybridization bottles at 65° C. overnight. The filters are washed under stringent conditions and signals are captured using a Fuji phosphorimager.

[0842] Data is extracted using AIS software and following background subtraction, signal normalization is performed. This includes a normalization of filter-wide expression levels between different experimental runs. Genes that are differentially expressed in the tissue of interest are identified and the full length sequence of these clones is generated.

### Example 4

[0843] Chromosomal Mapping of the Polynucleotides

[0844] An oligonucleotide primer set is designed according to the sequence at the 5′ end of SEQ ID NO:X. This primer preferably spans about 100 nucleotides. This primer set is then used in a polymerase chain reaction under the following set of conditions : 30 seconds, 95° C.; 1 minute, 56° C.; 1 minute, 70° C. This cycle is repeated 32 times followed by one 5 minute cycle at 70° C. Human, mouse, and hamster DNA is used as template in addition to a somatic cell hybrid panel containing individual chromosomes or chromosome fragments (Bios, Inc). The reactions is analyzed on either 8% polyacrylamide gels or 3.5% agarose gels. Chromosome mapping is determined by the presence of an approximately 100 bp PCR fragment in the particular somatic cell hybrid.

### Example 5

[0845] Bacterial Expression of a Polypeptide

[0846] A polynucleotide encoding a polypeptide of the present invention is amplified using PCR oligonucleotide primers corresponding to the 5′ and 3′ ends of the DNA sequence, as outlined in Example 1, to synthesize insertion fragments. The primers used to amplify the cDNA insert should preferably contain restriction sites, such as BamfHI and XbaI, at the 5′ end of the primers in order to clone the amplified product into the expression vector. For example, BamHI and XbaI correspond to the restriction enzyme sites on the bacterial expression vector pQE-9. (Qiagen, Inc., Chatsworth, Calif.). This plasmid vector encodes antibiotic resistance (Amp^{r}), a bacterial origin of replication (ori), an IPTG-regulatable promoter/operator (P/O), a ribosome binding site (RBS), a 6-histidine tag (6-His), and restriction enzyme cloning sites.

[0847] The pQE-9 vector is digested with BamHI and XbaI and the amplified fragment is ligated into the pQE-9 vector maintaining the reading frame initiated at the bacterial RBS. The ligation mixture is then used to transform the E. coli strain M15/rep4 (Qiagen, Inc.) which contains multiple copies of the plasmid pREP4, which expresses the lacI repressor and also confers kanamycin resistance (Kanr). Transformants are identified by their ability to grow on LB plates and ampicillin/kanamycin resistant colonies are selected. Plasmid DNA is isolated and confirmed by restriction analysis.

[0848] Clones containing the desired constructs are grown overnight (O/N) in liquid culture in LB media supplemented with both Amp (100 ug/ml) and Kan (25 ug/ml). The O/N culture is used to inoculate a large culture at a ratio of 1:100 to 1:250. The cells are grown to an optical density 600 (O.D. 600) of between 0.4 and 0.6. IPTG (Isopropyl-B-D-thiogalacto pyranoside) is then added to a final concentration of 1 mM. IPTG induces by inactivating the lacI repressor, clearing the P/O leading to increased gene expression.

[0849] Cells are grown for an extra 3 to 4 hours. Cells are then harvested by centrifugation (20 mins at 6000× g). The cell pellet is solubilized in the chaotropic agent 6 Molar Guanidine HCl by stirring for 3-4 hours at 4° C. The cell debris is removed by centrifugation, and the supernatant containing the polypeptide is loaded onto a nickel-nitrilo-tri-acetic acid (“Ni-NTA”) affinity resin column (available from QIAGEN, Inc., supra). Proteins with a 6× His tag bind to the Ni-NTA resin with high affinity and can be purified in a simple one-step procedure (for details see: The QIAexpressionist (1995) QIAGEN, Inc., supra).

[0850] Briefly, the supernatant is loaded onto the column in 6 M guanidine-HCl, pH 8, the column is first washed with 10 volumes of 6 M guanidine-HCl, pH 8, then washed with 10 volumes of 6 M guanidine-HCl pH 6, and finally the polypeptide is eluted with 6 M guanidine-HCl, pH 5.

[0851] The purified protein is then renatured by dialyzing it against phosphate- buffered saline (PBS) or 50 mM Na-acetate, pH 6 buffer plus 200 mM NaCl. Alternatively, the protein can be successfully refolded while immobilized on the Ni-NTA column. The recommended conditions are as follows: renature using a linear 6M-1M urea gradient in 500 mM NaCl, 20% glycerol, 20 mM Tris/HCl pH 7.4, containing protease inhibitors. The renaturation should be performed over a period of 1.5 hours or more. After renaturation the proteins are eluted by the addition of 250 mM immidazole. Immidazole is removed by a final dialyzing step against PBS or 50 mM sodium acetate pH 6 buffer plus 200 mM NaCl. The purified protein is stored at 4° C. or frozen at −80° C.

[0852] In addition to the above expression vector, the present invention further includes an expression vector comprising phage operator and promoter elements operatively linked to a polynucleotide of the present invention, called pHE4a. (ATCC Accession Number 209645, deposited on Feb. 25, 1998.) This vector contains: 1) a neomycinphosphotransferase gene as a selection marker, 2) an E. coli origin of replication, 3) a T5 phage promoter sequence, 4) two lac operator sequences, 5) a Shine-Delgarno sequence, and 6) the lactose operon repressor gene (laclq). The origin of replication (oriC) is derived from pUC19 (LTI, Gaithersburg, Md.). The promoter sequence and operator sequences are made synthetically.

[0853] DNA can be inserted into the pHEa by restricting the vector with NdeI and XbaI, BamHI, XhoI, or Asp718, running the restricted product on a gel, and isolating the larger fragment (the stuffer fragment should be about 310 base pairs). The DNA insert is generated according to the PCR protocol described in Example 1, using PCR primers having restriction sites for NdeI (5′ primer) and XbaI, BamHI, XhoI, or Asp718 (3′ primer). The PCR insert is gel purified and restricted with compatible enzymes. The insert and vector are ligated according to standard protocols.

[0854] The engineered vector could easily be substituted in the above protocol to express protein in a bacterial system.

### Example 6

[0855] Purification of a Polypeptidefrom an Inclusion Body

[0856] The following alternative method can be used to purify a polypeptide expressed in E coli when it is present in the form of inclusion bodies. Unless otherwise specified, all of the following steps are conducted at 4-10° C.

[0857] Upon completion of the production phase of the E. coli fermentation, the cell culture is cooled to 4-10° C. and the cells harvested by continuous centrifugation at 15,000 rpm (Heraeus Sepatech). On the basis of the expected yield of protein per unit weight of cell paste and the amount of purified protein required, an appropriate amount of cell paste, by weight, is suspended in a buffer solution containing 100 mM Tris, 50 mM EDTA, pH 7.4. The cells are dispersed to a homogeneous suspension using a high shear mixer.

[0858] The cells are then lysed by passing the solution through a microfluidizer (Microfuidics, Corp. or APV Gaulin, Inc.) twice at 4000-6000 psi. The homogenate is then mixed with NaCl solution to a final concentration of 0.5 M NaCl, followed by centrifugation at 7000× g for 15 min. The resultant pellet is washed again using 0.5M NaCl, 100 mM Tris, 50 mM EDTA, pH 7.4.

[0859] The resulting washed inclusion bodies are solubilized with 1.5 M guanidine hydrochloride (GuHCl) for 2-4 hours. After 7000× g centrifugation for 15 min., the pellet is discarded and the polypeptide containing supernatant is incubated at 4° C. overnight to allow further GuHCl extraction.

[0860] Following high speed centrifugation (30,000× g) to remove insoluble particles, the GuHCl solubilized protein is refolded by quickly mixing the GuHCl extract with 20 volumes of buffer containing 50 mM sodium, pH 4.5, 150 mM NaCl, 2 mM EDTA by vigorous stirring. The refolded diluted protein solution is kept at 4° C. without mixing for 12 hours prior to further purification steps.

[0861] To clarify the refolded polypeptide solution, a previously prepared tangential filtration unit equipped with 0.16 μm membrane filter with appropriate surface area (e.g., Filtron), equilibrated with 40 mM sodium acetate, pH 6.0 is employed. The filtered sample is loaded onto a cation exchange resin (e.g., Poros HS-50, Perseptive Biosystems). The column is washed with 40 mM sodium acetate, pH 6.0 and eluted with 250 mM, 500 mM, 1000 mM, and 1500 mM NaCl in the same buffer, in a stepwise manner. The absorbance at 280 nm of the effluent is continuously monitored. Fractions are collected and further analyzed by SDS-PAGE.

[0862] Fractions containing the polypeptide are then pooled and mixed with 4 volumes of water. The diluted sample is then loaded onto a previously prepared set of tandem columns of strong anion (Poros HQ-50, Perseptive Biosystems) and weak anion (Poros CM-20, Perseptive Biosystems) exchange resins. The columns are equilibrated with 40 mM sodium acetate, pH 6.0. Both columns are washed with 40 mM sodium acetate, pH 6.0, 200 mM NaCl. The CM-20 column is then eluted using a 10 column volume linear gradient ranging from 0.2 M NaCl, 50 mM sodium acetate, pH 6.0 to 1.0 M NaCl, 50 mM sodium acetate, pH 6.5. Fractions are collected under constant A₂₈₀ monitoring of the effluent. Fractions containing the polypeptide (determined, for instance, by 16% SDS-PAGE) are then pooled.

[0863] The resultant polypeptide should exhibit greater than 95% purity after the above refolding and purification steps. No major contaminant bands should be observed from Commassie blue stained 16% SDS-PAGE gel when 5 μg of purified protein is loaded. The purified protein can also be tested for endotoxin/LPS contamination, and typically the LPS content is less than 0.1 ng/ml according to LAL assays.

### Example 7

[0864] Cloning and Expression of a Polypeptide in a Baculovirus Expression System

[0865] In this example, the plasmid shuttle vector pA2 is used to insert a polynucleotide into a baculovirus to express a polypeptide. This expression vector contains the strong polyhedrin promoter of the Autographa califormica nuclear polyhedrosis virus (AcMNPV) followed by convenient restriction sites such as BamHI, Xba I and Asp7l8. The polyadenylation site of the simian virus 40 (“SV40”) is used for efficient polyadenylation. For easy selection of recombinant virus, the plasmid contains the beta-galactosidase gene from E. coli under control of a weak Drosophila promoter in the same orientation, followed by the polyadenylation signal of the polyhedrin gene. The inserted genes are flanked on both sides by viral sequences for cell-mediated homologous recombination with wild-type viral DNA to generate a viable virus that express the cloned polynucleotide.

[0866] Many other baculovirus vectors can be used in place of the vector above, such as pAc373, pVL941, and pAcIM1, as one skilled in the art would readily appreciate, as long as the construct provides appropriately located signals for transcription, translation, secretion and the like, including a signal peptide and an in-frame AUG as required. Such vectors are described, for instance, in Luckow et al., Virology 170:31-39 (1989).

[0867] Specifically, the cDNA sequence contained in the deposited clone, including the AUG initiation codon, is amplified using the PCR protocol described in Example 1. If a naturally occurring signal sequence is used to produce the polypeptide of the present invention, the pA2 vector does not need a second signal peptide. Alternatively, the vector can be modified (pA2 GP) to include a baculovirus leader sequence, using the standard methods described in Summers et al., “A Manual of Methods for Baculovirus Vectors and Insect Cell Culture Procedures,” Texas Agricultural Experimental Station Bulletin No. 1555 (1987).

[0868] The amplified fragment is isolated from a 1% agarose gel using a commercially available kit (“Geneclean,” BIO 101 Inc., La Jolla, Calif.). The fragment then is digested with appropriate restriction enzymes and again purified on a 1% agarose gel.

[0869] The plasmid is digested with the corresponding restriction enzymes and optionally, can be dephosphorylated using calf intestinal phosphatase, using routine procedures known in the art. The DNA is then isolated from a 1% agarose gel using a commercially available kit (“Geneclean” BIO 101 Inc., La Jolla, Calif.).

[0870] The fragment and the dephosphorylated plasmid are ligated together with T4 DNA ligase. E. coli HB101 or other suitable E. coli hosts such as XL-1 Blue (Stratagene Cloning Systems, La Jolla, Calif.) cells are transformed with the ligation mixture and spread on culture plates. Bacteria containing the plasmid are identified by digesting DNA from individual colonies and analyzing the digestion product by gel electrophoresis. The sequence of the cloned fragment is confirmed by DNA sequencing.

[0871] Five μg of a plasmid containing the polynucleotide is co-transfected with 1.0 μg of a commercially available linearized baculovirus DNA (“BaculoGoldTm baculovirus DNA”, Pharmingen, San Diego, Calif.), using the lipofection method described by Felgner et al., Proc. Natl. Acad. Sci. USA 84:7413-7417 (1987). One μg of BaculoGold™ virus DNA and 5 μg of the plasmid are mixed in a sterile well of a microtiter plate containing 50 μl of serum-free Grace's medium (Life Technologies Inc., Gaithersburg, Md.). Afterwards, 10 μl Lipofectin plus 90 μl Grace's medium are added, mixed and incubated for 15 minutes at room temperature. Then the transfection mixture is added drop-wise to Sf9 insect cells (ATCC CRL 1711) seeded in a 35 mm tissue culture plate with 1 ml Grace's medium without serum. The plate is then incubated for 5 hours at 27° C. The transfection solution is then removed from the plate and 1 ml of Grace's insect medium supplemented with 10% fetal calf serum is added. Cultivation is then continued at 27° C. for four days.

[0872] After four days the supernatant is collected and a plaque assay is performed, as described by Summers and Smith, supra. An agarose gel with “Blue Gal” (Life Technologies Inc., Gaithersburg) is used to allow easy identification and isolation of gal-expressing clones, which produce blue-stained plaques. (A detailed description of a “plaque assay” of this type can also be found in the user's guide for insect cell culture and baculovirology distributed by Life Technologies Inc., Gaithersburg, page 9-10.) After appropriate incubation, blue stained plaques are picked with the tip of a micropipettor (e.g., Eppendorf). The agar containing the recombinant viruses is then resuspended in a microcentrifuge tube containing 200 μl of Grace's medium and the suspension containing the recombinant baculovirus is used to infect Sf9 cells seeded in 35 mm dishes. Four days later the supernatants of these culture dishes are harvested and then they are stored at 4° C.

[0873] To verify the expression of the polypeptide, Sf9 cells are grown in Grace's medium supplemented with 10% heat-inactivated FBS. The cells are infected with the recombinant baculovirus containing the polynucleotide at a multiplicity of infection (“MOI”) of about 2. If radiolabeled proteins are desired, 6 hours later the medium is removed and is replaced with SF900 II medium minus methionine and cysteine (available from Life Technologies Inc., Rockville, Md.). After 42 hours, 5 μCi of ³⁵S-methionine and 5 μCi ³⁵S-cysteine (available from Amersham) are added. The cells are further incubated for 16 hours and then are harvested by centrifugation. The proteins in the supernatant as well as the intracellular proteins are analyzed by SDS-PAGE followed by autoradiography (if radiolabeled).

[0874] Microsequencing of the amino acid sequence of the amino terminus of purified protein may be used to determine the amino terminal sequence of the produced protein.

### Example 8

[0875] Expression of a Polypeptide in Mammalian Cells

[0876] The polypeptide of the present invention can be expressed in a mammalian cell. A typical mammalian expression vector contains a promoter element, which mediates the initiation of transcription of mRNA, a protein coding sequence, and signals required for the termination of transcription and polyadenylation of the transcript. Additional elements include enhancers, Kozak sequences and intervening sequences flanked by donor and acceptor sites for RNA splicing. Highly efficient transcription is achieved with the early and late promoters from SV40, the long terminal repeats (LTRs) from Retroviruses, e.g., RSV, HTLVI, HIVI and the early promoter of the cytomegalovirus (CMV). However, cellular elements can also be used (e.g., the human actin promoter).

[0877] Suitable expression vectors for use in practicing the present invention include, for example, vectors such as pSVL and pMSG (Pharmacia, Uppsala, Sweden), pRSVcat (ATCC 37152), pSV2dhfr (ATCC 37146), pBC12MI (ATCC 67109), pCMVSport 2.0, and pCMVSport 3.0. Mammalian host cells that could be used include, human Hela, 293, H9 and Jurkat cells, mouse NIH3T3 and C127 cells, Cos 1, Cos 7 and CV1, quail QC1-3 cells, mouse L cells and Chinese hamster ovary (CHO) cells.

[0878] Alternatively, the polypeptide can be expressed in stable cell lines containing the polynucleotide integrated into a chromosome. The co-transfection with a selectable marker such as DHFR, gpt, neomycin, hygromycin allows the identification and isolation of the transfected cells.

[0879] The transfected gene can also be amplified to express large amounts of the encoded protein. The DHFR (dihydrofolate reductase) marker is useful in developing cell lines that carry several hundred or even several thousand copies of the gene of interest. (See, e.g., Alt, F. W., et al., J. Biol. Chem. 253:1357-1370 (1978); Hamlin, J. L. and Ma, C., Biochem. et Biophys. Acta, 1097:107-143 (1990); Page, M. J. and Sydenham, M. A., Biotechnology 9:64-68 (1991).) Another useful selection marker is the enzyme glutamine synthase (GS) (Murphy et al., Biochem J. 227:277-279 (1991); Bebbington et al., Bio/Technology 10:169-175 (1992). Using these markers, the mammalian cells are grown in selective medium and the cells with the highest resistance are selected. These cell lines contain the amplified gens) integrated into a chromosome. Chinese hamster ovary (CHO) and NSO cells are often used for the production of proteins.

[0880] Derivatives of the plasmid pSV2-dhfr (ATCC Accession No. 37146), the expression vectors pC4 (ATCC Accession No. 209646) and pC6 (ATCC Accession No.209647) contain the strong promoter (LTR) of the Rous Sarcoma Virus (Cullen et al., Molecular and Cellular Biology, 438-447 (March, 1985)) plus a fragment of the CMV- enhancer (Boshart et al., Cell 41:521-530 (1985).) Multiple cloning sites, e.g., with the restriction enzyme cleavage sites Bamlil, XbaI and Asp718, facilitate the cloning of the gene of interest. The vectors also contain the 3′ intron, the polyadenylation and termination signal of the rat preproinsulin gene, and the mouse DHFR gene under control of the SV40 early promoter.

[0881] Specifically, the plasmid pC6, for example, is digested with appropriate restriction enzymes and then dephosphorylated using calf intestinal phosphates by procedures known in the art. The vector is then isolated from a 1% agarose gel.

[0882] A polynucleotide of the present invention is amplified according to the protocol outlined in Example 1. If a naturally occurring signal sequence is used to produce the polypeptide of the present invention, the vector does not need a second signal peptide. Alternatively, if a naturally occurring signal sequence is not used, the vector can be modified to include a heterologous signal sequence. (See, e.g., WO 96/34891.)

[0883] The amplified fragment is isolated from a 1% agarose gel using a commercially available kit (“Geneclean,” BIO 101 Inc., La Jolla, Calif.). The fragment then is digested with appropriate restriction enzymes and again purified on a 1% agarose gel.

[0884] The amplified fragment is then digested with the same restriction enzyme and purified on a 1% agarose gel. The isolated fragment and the dephosphorylated vector are then ligated with T4 DNA ligase. E. coli HB101 or XL-1 Blue cells are then transformed and bacteria are identified that contain the fragment inserted into plasmid pC6 using, for instance, restriction enzyme analysis.

[0885] Chinese hamster ovary cells lacking an active DHFR gene is used for transfection. Five μg of the expression plasmid pC6 or pC4 is cotransfected with 0.5 μg of the plasmid pSVneo using lipofectin (Felgner et al., supra). The plasmid pSV2-neo contains a dominant selectable marker, the neo gene from Tn5 encoding an enzyme that confers resistance to a group of antibiotics including G418. The cells are seeded in alpha minus MEM supplemented with 1 mg/ml G418. After 2 days, the cells are trypsinized and seeded in hybridoma cloning plates (Greiner, Germany) in alpha minus MEM supplemented with 10, 25, or 50 ng/ml of metothrexate plus 1 mg/ml G418. After about 10-14 days single clones are trypsinized and then seeded in 6-well petri dishes or 10 ml flasks using different concentrations of methotrexate (50 nM, 100 nM, 200 nM, 400 nM, 800 nM). Clones growing at the highest concentrations of methotrexate are then transferred to new 6-well plates containing even higher concentrations of methotrexate (1 μM, 2 μM, 5 μM, 10 mM, 20 mM). The same procedure is repeated until clones are obtained which grow at a concentration of 100-200 μM. Expression of the desired gene product is analyzed, for instance, by SDS-PAGE and Western blot or by reversed phase HPLC analysis.

### Example 9

[0886] Protein Fusions

[0887] The polypeptides of the present invention are preferably fused to other proteins. These fusion proteins can be used for a variety of applications. For example, fusion of the present polypeptides to His-tag, HA-tag, protein A, IgG domains, and maltose binding protein facilitates purification. (See Example 5; see also EP A 394,827; Traunecker, et al., Nature 331:84-86 (1988).) Similarly, fusion to IgG-1, IgG-3, and albumin increases the halflife time in vivo. Nuclear localization signals fused to the polypeptides of the present invention can target the protein to a specific subcellular localization, while covalent heterodimer or homodimers can increase or decrease the activity of a fusion protein. Fusion proteins can also create chimeric molecules having more than one function. Finally, fusion proteins can increase solubility and/or stability of the fused protein compared to the non-fused protein. All of the types of fusion proteins described above can be made by modifying the following protocol, which outlines the fusion of a polypeptide to an IgG molecule, or the protocol described in Example 5.

[0888] Briefly, the human Fc portion of the IgG molecule can be PCR amplified, using primers that span the 5′ and 3′ ends of the sequence described below. These primers also should have convenient restriction enzyme sites that will facilitate cloning into an expression vector, preferably a mammalian expression vector.

[0889] For example, if pC4 (Accession No. 209646) is used, the human Fc portion can be ligated into the BamHi cloning site. Note that the 3′ BamHli site should be destroyed. Next, the vector containing the human Fc portion is re-restricted with BamHI, linearizing the vector, and a polynucleotide of the present invention, isolated by the PCR protocol described in Example 1, is ligated into this BamHI site. Note that the polynucleotide is cloned without a stop codon, otherwise a fusion protein will not be produced.

[0890] If the naturally occurring signal sequence is used to produce the polypeptide of the present invention, pC4 does not need a second signal peptide. Alternatively, if the naturally occurring signal sequence is not used, the vector can be modified to include a heterologous signal sequence. (See, e.g., WO 96/34891.).

| | |
|---|---|
| Human IgG Fc region: | |
| GGGATCCGGAGCCCAAATCTTCTGACAAAACTCACACATGCCCACCGTGCCCA | (SEQ ID NO:1547) |
| GCACCTGAATTCGAGGGTGCACCGTCAGTCTTCCTCTTCCCCCCAAAACCCAA | |
| GGACACCCTCATGATCTCCCGGACTCCTGAGGTCACATGCGTGGTGGTGGACG | |
| TAAGCCACGAAGACCCTGAGGTCAAGTTCAACTGGTACGTGGACGGCGTGGA | |
| GGTGCATAATGCCAAGACAAAGCCGCGGGAGGAGCAGTACAACAGCACGTAC | |
| CGTGTGGTCAGCGTCCTCACCGTCCTGCACCAGGACTGGCTGAATGGCAAGGA | |
| GTACAAGTGCAAGGTCTCCAACAAAGCCCTCCCAACCCCCATCGAGAAAACC | |
| ATCTCCAAAGCCAAAGGGCAGCCCCGAGAACCACAGGTGTACACCCTGCCCC | |
| CATCCCGGGATGAGCTGACCAAGAACCAGGTCAGCCTGACCTGCCTGGTCAA | |
| AGGCTTCTATCCAAGCGACATCGCCGTGGAGTGGGAGAGCAATGGGCAGCCG | |
| GAGAACAACTACAAGACCACGCCTCCCGTGCTGGACTCCGACGGCTCCTTCTT | |
| CCTCTACAGCAAGCTCACCGTGGACAAGAGCAGGTGGCAGCAGGGGAACGTC | |
| TTCTCATGCTCCGTGATGCATGAGGCTCTGCACAACCACTACACGCAGAAGAG | |
| CCTCTCCCTGTCTCCGGGTAAATGAGTGCGACGGCCGCGACTCTAGAGGAT | |

### Example 10

[0891] Production of an Antibody from a Polypeptide

[0892] a) Hybridoma Technology

[0893] The antibodies of the present invention can be prepared by a variety of methods. (See, Current Protocols, Chapter 2.) As one example of such methods, cells expressing polypeptide of the present invention are administered to an animal to induce the production of sera containing polyclonal antibodies. In a preferred method, a preparation of polypeptide of the present invention is prepared and purified to render it substantially free of natural contaminants. Such a preparation is then introduced into an animal in order to produce polyclonal antisera of greater specific activity.

[0894] Monoclonal antibodies specific for polypeptide of the present invention are prepared using hybridoma technology. (Kohler et al., Nature 256:495 (1975); Kohler et al., Eur. J. Immunol. 6:511 (1976); Kohler et al., Eur. J. Immunol. 6:292 (1976); Hammerling et al., in: Monoclonal Antibodies and T-Cell Hybridomas, Elsevier, N.Y., pp. 563-681 (1981)). In general, an animal (preferably a mouse) is immunized with polypeptide of the present invention or, more preferably, with a secreted polypeptide of the present invention-expressing cell. Such polypeptide-expressing cells are cultured in any suitable tissue culture medium, preferably in Earle's modified Eagle's medium supplemented with 10% fetal bovine serum (inactivated at about 56° C.), and supplemented with about 10 g/l of nonessential amino acids, about 1,000 U/ml of penicillin, and about 100 μg/ml of streptomycin.

[0895] The splenocytes of such mice are extracted and fused with a suitable myeloma cell line. Any suitable myeloma cell line may be employed in accordance with the present invention; however, it is preferable to employ the parent myeloma cell line (SP20), available from the ATCC. After fusion, the resulting hybridoma cells are selectively maintained in HAT medium, and then cloned by limiting dilution as described by Wands et al. (Gastroenterology 80:225-232 (1981)). The hybridoma cells obtained through such a selection are then assayed to identify clones which secrete antibodies capable of binding the polypeptide of the present invention.

[0896] Alternatively, additional antibodies capable of binding to polypeptide of the present invention can be produced in a two-step procedure using anti-idiotypic antibodies. Such a method makes use of the fact that antibodies are themselves antigens, and therefore, it is possible to obtain an antibody which binds to a second antibody. In accordance with this method, protein specific antibodies are used to immunize an animal, preferably a mouse. The splenocytes of such an animal are then used to produce hybridoma cells, and the hybridoma cells are screened to identify clones which produce an antibody whose ability to bind to the polypeptide of the present invention-specific antibody can be blocked by polypeptide of the present invention. Such antibodies comprise anti-idiotypic antibodies to the polypeptide of the present invention-specific antibody and are used to immunize an animal to induce formation of further polypeptide of the present invention-specific antibodies.

[0897] For in vivo use of antibodies in humans, an antibody is “humanized”. Such antibodies can be produced using genetic constructs derived from hybridoma cells producing the monoclonal antibodies described above. Methods for producing chimeric and humanized antibodies are known in the art and are discussed herein. (See, for review, Morrison, Science 229:1202 (1985); Oi et al., BioTechniques 4:214 (1986); Cabilly et al., U.S. Pat. No. 4,816,567; Taniguchi et al., EP 171496; Morrison et al., EP 173494; Neuberger et al., WO 8601533; Robinson et al., WO 8702671; Boulianne et al., Nature 312:643 (1984); Neuberger et al., Nature 314:268 (1985).)

[0898] b) Isolation of Antibody Fragments Directed Against Polypeptide of the Present Invention from a Library Of scFvs

[0899] Naturally occurring V-genes isolated from human PBLs are constructed into a library of antibody fragments which contain reactivities against polypeptide of the present invention to which the donor may or may not have been exposed (see e.g., U.S. Pat. No. 5,885,793 incorporated herein by reference in its entirety).

[0900] Rescue of the Library.

[0901] A library of scFvs is constructed from the RNA of human PBLs as described in PCT publication WO 92/01047. To rescue phage displaying antibody fragments, approximately 109 E. coli harboring the phagemid are used to inoculate 50 ml of 2xTY containing 1% glucose and 100 μg/ml of ampicillin (2× TY-AMP-GLU) and grown to an O.D. of 0.8 with shaking. Five ml of this culture is used to innoculate 50 ml of 2× TY-AMP-GLU, 2×108 TU of delta gene 3 helper (M13 delta gene III, see PCT publication WO 92/01047) are added and the culture incubated at 37° C. for 45 minutes without shaking and then at 37° C. for 45 minutes with shaking. The culture is centrifuged at 4000 r.p.m. for 10 min. and the pellet resuspended in 2 liters of 2× TY containing 100 μg/ml ampicillin and 50 μg/ml kanamycin and grown overnight. Phage are prepared as described in PCT publication WO 92/01047.

[0902] M13 delta gene III is prepared as follows: M13 delta gene III helper phage does not encode gene III protein, hence the phagmid) displaying antibody fragments have a greater avidity of binding to antigen. Infectious M13 delta gene III particles are made by growing the helper phage in cells harboring a pUC19 derivative supplying the wild type gene III protein during phage morphogenesis. The culture is incubated for 1 hour at 37° C. without shaking and then for a further hour at 37° C. with shaking. Cells are spun down (IEC—Centra 8,400 r.p.m. for 10 min), resuspended in 300 ml 2× TY broth containing 100 μg ampicillin/ml and 25 μg kanamycin/ml (2× TY-AMP-KAN) and grown overnight, shaking at 37° C. Phage particles are purified and concentrated from the culture medium by two PEG-precipitations (Sambrook et al., 1990), resuspended in 2 ml PBS and passed through a 0.45 μm filter (Minisart NML; Sartorius) to give a final concentration of approximately 1013 transducing units/ml (ampicillin-resistant clones).

[0903] Panning of the Library.

[0904] Immunotubes (Nunc) are coated overnight in PBS with 4 ml of either 100 μg/ml or 10 μg/ml of a polypeptide of the present invention. Tubes are blocked with 2% Marvel-PBS for 2 hours at 37° C. and then washed 3 times in PBS. Approximately 1013 TU of phage is applied to the tube and incubated for 30 minutes at room temperature tumbling on an over and under turntable and then left to stand for another 1.5 hours. Tubes are washed 10 times with PBS 0.1% Tween-20 and 10 times with PBS. Phage are eluted by adding 1 ml of 100 mM triethylamine and rotating 15 minutes on an under and over turntable after which the solution is immediately neutralized with 0.5 ml of 1.OM Tris-HCl, pH 7.4. Phage are then used to infect 10 ml of mid-log E. coli TG1 by incubating eluted phage with bacteria for 30 minutes at 37° C. The E. coli are then plated on TYE plates containing 1% glucose and 100 μg/ml ampicillin. The resulting bacterial library is then rescued with delta gene 3 helper phage as described above to prepare phage for a subsequent round of selection. This process is then repeated for a total of 4 rounds of affinity purification with tube-washing increased to 20 times with PBS, 0.1% Tween-20 and 20 times with PBS for rounds 3 and 4.

[0905] Characterization of Binders.

[0906] Eluted phage from the 3rd and 4th rounds of selection are used to infect E. coli HB 2151 and soluble scFv is produced (Marks, et al., 1991) from single colonies for assay. ELISAs are performed with microtitre plates coated with either 10 pg/ml of the polypeptide of the present invention in 50 mM bicarbonate pH 9.6. Clones positive in ELISA are further characterized by PCR fingerprinting (see, e.g., PCT publication WO 92/01047) and then by sequencing. These ELISA positive clones may also be further characterized by techniques known in the art, such as, for example, epitope mapping, binding affinity, receptor signal transduction, ability to block or competitively inhibit antibody/antigen binding, and competitive agonistic or antagonistic activity.

### Example 11

[0907] Method of Determining Alterations in a Gene Corresponding to a Polynucleotide

[0908] RNA isolated from entire families or individual patients presenting with a phenotype of interest (such as a disease) is be isolated. cDNA is then generated from these RNA samples using protocols known in the art. (See, Sambrook.) The cDNA is then used as a template for PCR, employing primers surrounding regions of interest in SEQ ID NO:X; and/or the nucleotide sequence of the related cDNA in the cDNA clone contained in a deposited library. Suggested PCR conditions consist of 35 cycles at 95 degrees C for 30 seconds; 60-120 seconds at 52-58 degrees C; and 60-120 seconds at 70 degrees C, using buffer solutions described in Sidransky et al., Science 252:706 (1991).

[0909] PCR products are then sequenced using primers labeled at their 5′ end with T4 polynucleotide kinase, employing SequiTherm Polymerase. (Epicentre Technologies). The intron-exon borders of selected exons is also determined and genomic PCR products analyzed to confirm the results. PCR products harboring suspected mutations is then cloned and sequenced to validate the results of the direct sequencing.

[0910] PCR products is cloned into T-tailed vectors as described in Holton et al., Nucleic Acids Research, 19:1156 (1991) and sequenced with T7 polymerase (United States Biochemical). Affected individuals are identified by mutations not present in unaffected individuals.

[0911] Genomic rearrangements are also observed as a method of determining alterations in a gene corresponding to a polynucleotide. Genomic clones isolated according to Example 2 are nick-translated with digoxigenindeoxy-uridine 5′-triphosphate (Boehringer Manheim), and FISH performed as described in Johnson et al., Methods Cell Biol. 35:73-99 (1991). Hybridization with the labeled probe is carried out using a vast excess of human cot-1 DNA for specific hybridization to the corresponding genomic locus.

[0912] Chromosomes are counterstained with 4,6-diamino-2-phenylidole and propidium iodide, producing a combination of C- and R-bands. Aligned images for precise mapping are obtained using a triple-band filter set (Chroma Technology, Brattleboro, Vt.) in combination with a cooled charge-coupled device camera (Photometrics, Tucson, Ariz.) and variable excitation wavelength filters. (Johnson et al., Genet. Anal. Tech. Appl., 8:75 (1991).) Image collection, analysis and chromosomal fractional length measurements are performed using the ISee Graphical Program System. (Inovision Corporation, Durham, N.C.) Chromosome alterations of the genomic region hybridized by the probe are identified as insertions, deletions, and translocations. These alterations are used as a diagnostic marker for an associated disease.

### Example 12

[0913] Method of Detecting Abnormal Levels of a Polypeptide in a Biological Sample

[0914] A polypeptide of the present invention can be detected in a biological sample, and if an increased or decreased level of the polypeptide is detected, this polypeptide is a marker for a particular phenotype. Methods of detection are numerous, and thus, it is understood that one skilled in the art can modify the following assay to fit their particular needs.

[0915] For example, antibody-sandwich ELISAs are used to detect polypeptides in a sample, preferably a biological sample. Wells of a microtiter plate are coated with specific antibodies, at a final concentration of 0.2 to 10 ug/ml. The antibodies are either monoclonal or polyclonal and are produced by the method described in Example 10. The wells are blocked so that non-specific binding of the polypeptide to the well is reduced.

[0916] The coated wells are then incubated for >2 hours at RT with a sample containing the polypeptide. Preferably, serial dilutions of the sample should be used to validate results. The plates are then washed three times with deionized or distilled water to remove unbounded polypeptide.

[0917] Next, 50 ul of specific antibody-alkaline phosphatase conjugate, at a concentration of 25-400 ng, is added and incubated for 2 hours at room temperature. The plates are again washed three times with deionized or distilled water to remove unbounded conjugate.

[0918] Add 75 ul of 4-methylumbelliferyl phosphate (MUP) or p-nitrophenyl phosphate (NPP) substrate solution to each well and incubate 1 hour at room temperature. Measure the reaction by a microtiter plate reader. Prepare a standard curve, using serial dilutions of a control sample, and plot polypeptide concentration on the X-axis (log scale) and fluorescence or absorbance of the Y-axis (linear scale). Interpolate the concentration of the polypeptide in the sample using the standard curve.

### Example 13

[0919] Formulation

[0920] The invention also provides methods of treatment and/or prevention of diseases or disorders (such as, for example, any one or more of the diseases or disorders disclosed herein) by administration to a subject of an effective amount of a Therapeutic. By therapeutic is meant a polynucleotides or polypeptides of the invention (including fragments and variants), agonists or antagonists thereof, and/or antibodies thereto, in combination with a pharmaceutically acceptable carrier type (e.g., a sterile carrier).

[0921] The Therapeutic will be formulated and dosed in a fashion consistent with good medical practice, taking into account the clinical condition of the individual patient (especially the side effects of treatment with the Therapeutic alone), the site of delivery, the method of administration, the scheduling of administration, and other factors known to practitioners. The “effective amount” for purposes herein is thus determined by such considerations.

[0922] As a general proposition, the total pharmaceutically effective amount of the Therapeutic administered parenterally per dose will be in the range of about 1 ug/kg/day to 10 mg/kg/day of patient body weight, although, as noted above, this will be subject to therapeutic discretion. More preferably, this dose is at least 0.01 mg/kg/day, and most preferably for humans between about 0.01 and 1 mg/kg/day for the hormone. If given continuously, the Therapeutic is typically administered at a dose rate of about 1 ug/kg/hour to about 50 ug/kg/hour, either by 1-4 injections per day or by continuous subcutaneous infusions, for example, using a mini-pump. An intravenous bag solution may also be employed. The length of treatment needed to observe changes and the interval following treatment for responses to occur appears to vary depending on the desired effect.

[0923] Therapeutics can be are administered orally, rectally, parenterally, intracistemally, intravaginally, intraperitoneally, topically (as by powders, ointments, gels, drops or transdermal patch), bucally, or as an oral or nasal spray. “Pharmaceutically acceptable carrier” refers to a non-toxic solid, semisolid or liquid filler, diluent, encapsulating material or formulation auxiliary of any. The term “parenteral” as used herein refers to modes of administration which include intravenous, intramuscular, intraperitoneal, intrastemal, subcutaneous and intraarticular injection and infusion.

[0924] Therapeutics of the invention are also suitably administered by sustained-release systems. Suitable examples of sustained-release Therapeutics are administered orally, rectally, parenterally, intracistemally, intravaginally, intraperitoneally, topically (as by powders, ointments, gels, drops or transdermal patch), bucally, or as an oral or nasal spray. “Pharmaceutically acceptable carrier” refers to a non-toxic solid, semisolid or liquid filler, diluent, encapsulating material or formulation auxiliary of any type. The term “parenteral” as used herein refers to modes of administration which include intravenous, intramuscular, intraperitoneal, intrasternal, subcutaneous and intraarticular injection and infusion.

[0925] Therapeutics of the invention are also suitably administered by sustained-release systems. Suitable examples of sustained-release Therapeutics include suitable polymeric materials (such as, for example, semi-permeable polymer matrices in the form of shaped articles, e.g., films, or mirocapsules), suitable hydrophobic materials (for example as an emulsion in an acceptable oil) or ion exchange resins, and sparingly soluble derivatives (such as, for example, a sparingly soluble salt).

[0926] Sustained-release matrices include polylactides (U.S. Pat. No. 3,773,919, EP 58,481), copolymers of L-glutamic acid and gamma-ethyl-L-glutamate (Sidman et al., Biopolymers 22:547-556 (1983)), poly (2- hydroxyethyl methacrylate) (Langer et al., J. Biomed. Mater. Res. 15:167-277 (1981), and Langer, Chem. Tech. 12:98-105 (1982)), ethylene vinyl acetate (Langer et al., Id.) or poly-D- (−)-3-hydroxybutyric acid (EP 133,988).

[0927] Sustained-release Therapeutics also include liposomally entrapped Therapeutics of the invention (see generally, Langer, Science 249:1527-1533 (1990); Treat et al., in Liposomes in the Therapy of Infectious Disease and Cancer, Lopez-Berestein and Fidler (eds.), Liss, New York, pp. 317-327 and 353-365 (1989)). Liposomes containing the Therapeutic are prepared by methods known per se: DE 3,218,121; Epstein et al., Proc. Natl. Acad. Sci. (USA) 82:3688-3692 (1985); Hwang et al., Proc. Natl. Acad. Sci.(USA) 77:4030-4034 (1980); EP 52,322; EP 36,676; EP 88,046; EP 143,949; EP 142,641; Japanese Pat. Appl. 83-118008; U.S. Pat. Nos. 4,485,045 and 4,544,545; and EP 102,324. Ordinarily, the liposomes are of the small (about 200-800 Angstroms) unilamellar type in which the lipid content is greater than about 30 mol. percent cholesterol, the selected proportion being adjusted for the optimal Therapeutic.

[0928] In yet an additional embodiment, the Therapeutics of the invention are delivered by way of a pump (see Langer, supra; Sefton, CRC Crit. Ref. Biomed. Eng. 14:201 (1987); Buchwald et al., Surgery 88:507 (1980); Saudek et al., N. Engl. J. Med. 321:574 (1989)).

[0929] Other controlled release systems are discussed in the review by Langer (Science 249:1527-1533 (1990)).

[0930] For parenteral administration, in one embodiment, the Therapeutic is formulated generally by mixing it at the desired degree of purity, in a unit dosage injectable form (solution, suspension, or emulsion), with a pharmaceutically acceptable carrier, i.e., one that is non-toxic to recipients at the dosages and concentrations employed and is compatible with other ingredients of the formulation. For example, the formulation preferably does not include oxidizing agents and other compounds that are known to be deleterious to the Therapeutic.

[0931] Generally, the formulations are prepared by contacting the Therapeutic uniformly and intimately with liquid carriers or finely divided solid carriers or both. Then, if necessary, the product is shaped into the desired formulation. Preferably the carrier is a parenteral carrier, more preferably a solution that is isotonic with the blood of the recipient. Examples of such carrier vehicles include water, saline, Ringer's solution, and dextrose solution. Non-aqueous vehicles such as fixed oils and ethyl oleate are also useful herein, as well as liposomes.

[0932] The carrier suitably contains minor amounts of additives such as substances that enhance isotonicity and chemical stability. Such materials are non-toxic to recipients at the dosages and concentrations employed, and include buffers such as phosphate, citrate, succinate, acetic acid, and other organic acids or their salts; antioxidants such as ascorbic acid; low molecular weight (less than about ten residues) polypeptides, e.g., polyarginine or tripeptides; proteins, such as serum albumin, gelatin, or immunoglobulins; hydrophilic polymers such as polyvinylpyrrolidone; amino acids, such as glycine, glutamic acid, aspartic acid, or arginine; monosaccharides, disaccharides, and other carbohydrates including cellulose or its derivatives, glucose, manose, or dextrins; chelating agents such as EDTA; sugar alcohols such as mannitol or sorbitol; counterions such as sodium; and/or nonionic surfactants such as polysorbates, poloxamers, or PEG.

[0933] The Therapeutic is typically formulated in such vehicles at a concentration of about 0.1 mg/ml to 100 mg/ml, preferably 1-10 mg/ml, at a pH of about 3 to 8. It will be understood that the use of certain of the foregoing excipients, carriers, or stabilizers will result in the formation of polypeptide salts.

[0934] Any pharmaceutical used for therapeutic administration can be sterile. Sterility is readily accomplished by filtration through sterile filtration membranes (e.g., 0.2 micron membranes). Therapeutics generally are placed into a container having a sterile access port, for example, an intravenous solution bag or vial having a stopper pierceable by a hypodermic injection needle.

[0935] Therapeutics ordinarily will be stored in unit or multi-dose containers, for example, sealed ampoules or vials, as an aqueous solution or as a lyophilized formulation for reconstitution. As an example of a lyophilized formulation, 10-ml vials are filled with 5 ml of sterile-filtered 1% (w/v) aqueous Therapeutic solution, and the resulting mixture is lyophilized. The infusion solution is prepared by reconstituting the lyophilized Therapeutic using bacteriostatic Water-for-Injection.

[0936] The invention also provides a pharmaceutical pack or kit comprising one or more containers filled with one or more of the ingredients of the Therapeutics of the invention. Associated with such containes) can be a notice in the form prescribed by a governmental agency regulating the manufacture, use or sale of pharmaceuticals or biological products, which notice reflects approval by the agency of manufacture, use or sale for human administration. In addition, the Therapeutics may be employed in conjunction with other therapeutic compounds.

[0937] The Therapeutics of the invention may be administered alone or in combination with adjuvants. Adjuvants that may be administered with the Therapeutics of the invention include, but are not limited to, alum, alum plus deoxycholate (ImmunoAg), MTP-PE (Biocine Corp.), QS21 (Genentech, Inc.), BCG, and MPL. In a specific embodiment, Therapeutics of the invention are administered in combination with alum. In another specific embodiment, Therapeutics of the invention are administered in combination with QS-21. Further adjuvants that may be administered with the Therapeutics of the invention include, but are not limited to, Monophosphoryl lipid immunomodulator, AdjuVax lOOa, QS-21, QS-18, CRL1005, Aluminum salts, MF-59, and Virosomal adjuvant technology. Vaccines that may be administered with the Therapeutics of the invention include, but are not limited to, vaccines directed toward protection against MMR (measles, mumps, rubella), polio, varicella, tetanus/diptheria, hepatitis A, hepatitis B, haemophilus influenzae B, whooping cough, pneumonia, influenza, Lyme's Disease, rotavirus, cholera, yellow fever, Japanese encephalitis, poliomyelitis, rabies, typhoid fever, and pertussis. Combinations may be administered either concomitantly, e.g., as an admixture, separately but simultaneously or concurrently; or sequentially. This includes presentations in which the combined agents are administered together as a therapeutic mixture, and also procedures in which the combined agents are administered separately but simultaneously, e.g., as through separate intravenous lines into the same individual. Administration “in combination” further includes the separate administration of one of the compounds or agents given first, followed by the second.

[0938] The Therapeutics of the invention may be administered alone or in combination with other therapeutic agents. Therapeutic agents that may be administered in combination with the Therapeutics of the invention, include but not limited to, other members of the TNF family, chemotherapeutic agents, antibiotics, steroidal and non-steroidal anti-inflammatories, conventional immunotherapeutic agents, cytokines and/or growth factors. Combinations may be administered either concomitantly, e.g., as an admixture, separately but simultaneously or concurrently; or sequentially. This includes presentations in which the combined agents are administered together as a therapeutic mixture, and also procedures in which the combined agents are administered separately but simultaneously, e.g., as through separate intravenous lines into the same individual. Administration “in combination” further includes the separate administration of one of the compounds or agents given first, followed by the second.

[0939] In one embodiment, the Therapeutics of the invention are administered in combination with members of the TNF family. TNF, TNF-related or TNF-like molecules that may be administered with the Therapeutics of the invention include, but are not limited to, soluble forms of TNF-alpha, lymphotoxin-alpha (LT-alpha, also known as TNF-beta), LT-beta (found in complex heterotrimer LT-alpha2-beta), OPGL, FasL, CD27L, CD30L, CD40L, 4-lBBL, DcR3, OX40L, TNF-gamma (International Publication No. WO 96/14328), AIM-I (International Publication No. WO 97/33899), endokine-alpha (International Publication No. WO 98/07880), TR6 (International Publication No. WO 98/30694), OPG, and neutrokine-alpha (International Publication No. WO 98/18921, OX40, and nerve growth factor (NGF), and soluble forms of Fas, CD30, CD27, CD40 and 4-IBB, TR2 (International Publication No. WO 96/34095), DR3 (International Publication No. WO 97/33904), DR4 (International Publication No. WO 98/32856), TR5 (International Publication No. WO 98/30693), TR6 (International Publication No. WO 98/30694), TR7 (International Publication No. WO 98/41629), TRANK, TR9 (International Publication No. WO 98/56892),TR10 (International Publication No. WO 98/54202), 312C2 (International Publication No. WO 98/06842), and TR12, and soluble forms CD154, CD70, and CD153.

[0940] In certain embodiments, Therapeutics of the invention are administered in combination with antiretroviral agents, nucleoside reverse transcriptase inhibitors, non-nucleoside reverse transcriptase inhibitors, and/or protease inhibitors. Nucleoside reverse transcriptase inhibitors that may be administered in combination with the Therapeutics of the invention, include, but are not limited to, RETROVIRTM (zidovudine/AZT), VIDEXTM (didanosine/ddl), HIVID™ (zalcitabine/ddC), ZERIT™ (stavudine/d4T), EPIVIR™ (lamivudine/3TC), and COMBIVIR™ (zidovudine/lamivudine). Non-nucleoside reverse transcriptase inhibitors that may be administered in combination with the Therapeutics of the invention, include, but are not limited to, VIRAMUNE™ (nevirapine), RESCRIPTOR™ (delavirdine), and SUSTIVA™ (efavirenz). Protease inhibitors that may be administered in combination with the Therapeutics of the invention, include, but are not limited to, CRIXIVAN™ (indinavir), NORVIR™ (ritonavir), INVIRASE™ (saquinavir), and VIRACEPT™ (nelfinavir). In a specific embodiment, antiretroviral agents, nucleoside reverse transcriptase inhibitors, non-nucleoside reverse transcriptase inhibitors, and/or protease inhibitors may be used in any combination with Therapeutics of the invention to treat AIDS and/or to prevent or treat HIV infection.

[0941] In other embodiments, Therapeutics of the invention may be administered in combination with anti-opportunistic infection agents. Anti-opportunistic agents that may be administered in combination with the Therapeutics of the invention, include, but are not limited to, TRIMETHOPRIM-SULFAMETHOXAZOLE™, DAPSONE™, PENTAMIDINE™, ATOVAQUONE™, ISONIAZID™, RIFAMPIN™, PYRAZINAMIDE™, ETHAMBUTOL™, RIFABUTIN™, CLARITHROMYCIN™, AZITHROMYCIN™, GANCICLOVIR™, FOSCARNET™, CIDOFOVIR™, FLUCONAZOLE™, ITRACONAZOLE™, KETOCONAZOLE™, ACYCLOVIR™, FAMCICOLVIR™, PYRIMETHAMINE™, LEUCOVORIN™, NEUPOGEN™ (filgrastim/G-CSF), and LEUKINE™ (sargramostim/GM-CSF). In a specific embodiment, Therapeutics of the invention are used in any combination with TRIMETHOPRIM-SULFAMETHOXAZOLE™, DAPSONE™, PENTAMIDINE™, and/or ATOVAQUONE™ to prophylactically treat or prevent an opportunistic Pneumocystis carinii pneumonia infection. In another specific embodiment, Therapeutics of the invention are used in any combination with ISONIAZID™, RIFAMPIN™, PYRAZINAMIDE™, and/or ETHAMBUTOL™ to prophylactically treat or prevent an opportunistic Mycobacterium avium complex infection. In another specific embodiment, Therapeutics of the invention are used in any combination with RIFABUTIN™, CLARITHROMYCIN™, and/or AZITHROMYCN™ to prophylactically treat or prevent an opportunistic Mycobacterium tuberculosis infection. In another specific embodiment, Therapeutics of the invention are used in any combination with GANCICLOVIR™, FOSCARNET™, and/or CIDOFOVIR™ to prophylactically treat or prevent an opportunistic cytomegalovirus infection. In another specific embodiment, Therapeutics of the invention are used in any combination with FLUCONAZOLE™, ITRACONAZOLE™, and/or KETOCONAZOLE™ to prophylactically treat or prevent an opportunistic fungal infection. In another specific embodiment, Therapeutics of the invention are used in any combination with ACYCLOVIR™ and/or FAMCICOLVIR™ to prophylactically treat or prevent an opportunistic herpes simplex virus type I and/or type II infection. In another specific embodiment, Therapeutics of the invention are used in any combination with PYRIMETHAMINE™ and/or LEUCOVORIN™ to prophylactically treat or prevent an opportunistic Toxoplasma gondii infection. In another specific embodiment, Therapeutics of the invention are used in any combination with LEUCOVORIN™ and/or NEUPOGEN™ to prophylactically treat or prevent an opportunistic bacterial infection.

[0942] In a further embodiment, the Therapeutics of the invention are administered in combination with an antiviral agent. Antiviral agents that may be administered with the Therapeutics of the invention include, but are not limited to, acyclovir, ribavirin, amantadine, and remantidine.

[0943] In a further embodiment, the Therapeutics of the invention are administered in combination with an antibiotic agent. Antibiotic agents that may be administered with the Therapeutics of the invention include, but are not limited to, amoxicillin, beta-lactamases, aminoglycosides, beta-lactam (glycopeptide), beta-lactamases, Clindamycin, chloramphenicol, cephalosporins, ciprofloxacin, ciprofloxacin, erythromycin, fluoroquinolones, macrolides, metronidazole, penicillins, quinolones, rifampin, streptomycin, sulfonamide, tetracyclines, trimethoprim, trimethoprim-sulfamthoxazole, and vancomycin.

[0944] Conventional nonspecific immunosuppressive agents, that may be administered in combination with the Therapeutics of the invention include, but are not limited to, steroids, cyclosporine, cyclosporine analogs, cyclophosphamide methylprednisone, prednisone, azathioprine, FK-506, 15-deoxyspergualin, and other immunosuppressive agents that act by suppressing the function of responding T cells.

[0945] In specific embodiments, Therapeutics of the invention are administered in combination with immunosuppressants. Immunosuppressants preparations that may be administered with the Therapeutics of the invention include, but are not limited to, ORTHOCLONE™ (OKT3), SANDIMMUNNE™/NEORAL™/SANGDYA™(cyclosporin), PROGRAF™ (tacrolimus), CELLCEPT™ (mycophenolate), Azathioprine, glucorticosteroids, and RAPAMUNE™ (sirolimus). In a specific embodiment, immunosuppressants may be used to prevent rejection of organ or bone marrow transplantation.

[0946] In an additional embodiment, Therapeutics of the invention are administered alone or in combination with one or more intravenous immune globulin preparations. Intravenous immune globulin preparations that may be administered with the Therapeutics of the invention include, but not limited to, GAMMAR™, IVEEGAM™, SANDOGLOBULIN™, GAMMAGARD S/D™, and GAMIMUNE™. In a specific embodiment, Therapeutics of the invention are administered in combination with intravenous immune globulin preparations in transplantation therapy (e.g., bone marrow transplant).

[0947] In an additional embodiment, the Therapeutics of the invention are administered alone or in combination with an anti-inflammatory agent. Anti-inflammatory agents that may be administered with the Therapeutics of the invention include, but are not limited to, glucocorticoids and the nonsteroidal anti-inflammatories, aminoarylcarboxylic acid derivatives, arylacetic acid derivatives, arylbutyric acid derivatives, arylcarboxylic acids, arylpropionic acid derivatives, pyrazoles, pyrazolones, salicylic acid derivatives, thiazinecarboxamides, e-acetamidocaproic acid, S-adenosylmethionine, 3-amino-4-hydroxybutyric acid, amixetrine, bendazac, benzydamine, bucolome, difenpiramide, ditazol, emorfazone, guaiazulene, nabumetone, nimesulide, orgotein, oxaceprol, paranyline, perisoxal, pifoxime, proquazone, proxazole, and tenidap.

[0948] In another embodiment, compostions of the invention are administered in combination with a chemotherapeutic agent. Chemotherapeutic agents that may be administered with the Therapeutics of the invention include, but are not limited to, antibiotic derivatives (e.g., doxorubicin, bleomycin, daunorubicin, and dactinomycin); antiestrogens (e.g., tamoxifen); antimetabolites (e.g., fluorouracil, 5-Fu, methotrexate, floxuridine, interferon alpha-2b, glutamic acid, plicamycin, mercaptopurine, and 6-thioguanine); cytotoxic agents (e.g., carmustine, BCNU, lomustine, CCNU, cytosine arabinoside, cyclophosphamide, estramustine, hydroxyurea, procarbazine, mitomycin, busulfan, cis-platin, and vincristine sulfate); hormones (e.g., medroxyprogesterone, estramustine phosphate sodium, ethinyl estradiol, estradiol, megestrol acetate, methyltestosterone, diethylstilbestrol diphosphate, chlorotrianisene, and testolactone); nitrogen mustard derivatives (e.g., mephalen, chorambucil, mechlorethamine (nitrogen mustard) and thiotepa); steroids and combinations (e.g., bethamethasone sodium phosphate); and others (e.g., dicarbazine, asparaginase, mitotane, vincristine sulfate, vinblastine sulfate, and etoposide).

[0949] In a specific embodiment, Therapeutics of the invention are administered in combination with CHOP (cyclophosphamide, doxorubicin, vincristine, and prednisone) or any combination of the components of CHOP. In another embodiment, Therapeutics of the invention are administered in combination with Rituximab. In a further embodiment, Therapeutics of the invention are administered with Rituxmab and CHOP, or Rituxmab and any combination of the components of CHOP.

[0950] In an additional embodiment, the Therapeutics of the invention are administered in combination with cytokines. Cytokines that may be administered with the Therapeutics of the invention include, but are not limited to, IL2, IL3, IL4, IL5, IL6, IL7, IL10, IL12, IL13, IL15, anti-CD40, CD40L, IFN-gamma and TNF-alpha. In another embodiment, Therapeutics of the invention may be administered with any interleukin, including, but not limited to, IL-lalpha, IL-lbeta, IL-2, IL-3, IL-4, IL-5, IL-6, IL-7, IL-8, IL-9, IL-10, IL-11, IL-12, IL-13, IL-14, IL-15, IL-16, IL-17, IL-18, IL-19, IL-20, and IL-21.

[0951] In an additional embodiment, the Therapeutics of the invention are administered in combination with angiogenic proteins. Angiogenic proteins that may be administered with the Therapeutics of the invention include, but are not limited to, Glioma Derived Growth Factor (GDGF), as disclosed in European Patent Number EP-399816; Platelet Derived Growth Factor-A (PDGF-A), as disclosed in European Patent Number EP-6821 10; Platelet Derived Growth Factor-B (PDGF-B), as disclosed in European Patent Number EP-282317; Placental Growth Factor (P1GF), as disclosed in International Publication Number WO 92/06194; Placental Growth Factor-2 (P1GF-2), as disclosed in Hauser et al., Gorwth Factors, 4:259-268 (1993); Vascular Endothelial Growth Factor (VEGF), as disclosed in International Publication Number WO 90/13649; Vascular Endothelial Growth Factor-A (VEGF-A), as disclosed in European Patent Number EP-506477; Vascular Endothelial Growth Factor-2 (VEGF-2), as disclosed in International Publication Number WO 96/39515; Vascular Endothelial Growth Factor B (VEGF-3); Vascular Endothelial Growth Factor B-186 (VEGF-B186), as disclosed in International Publication Number WO 96/26736; Vascular Endothelial Growth Factor-D (VEGF-D), as disclosed in International Publication Number WO 98/02543; Vascular Endothelial Growth Factor-D (VEGF-D), as disclosed in International Publication Number WO 98/07832; and Vascular Endothelial Growth Factor-E (VEGF-E), as disclosed in German Patent Number DE19639601. The above mentioned references are incorporated herein by reference herein.

[0952] In an additional embodiment, the Therapeutics of the invention are administered in combination with hematopoietic growth factors. Hematopoietic growth factors that may be administered with the Therapeutics of the invention include, but are not limited to, LEUKINE™ (SARGRAMOSTIM™) and NEUPOGEN™ (FILGRASTIM™).

[0953] In an additional embodiment, the Therapeutics of the invention are administered in combination with Fibroblast Growth Factors. Fibroblast Growth Factors that may be administered with the Therapeutics of the invention include, but are not limited to, FGF-1, FGF-2, FGF-3, FGF-4, FGF-5, FGF-6, FGF-7, FGF-8, FGF-9, FGF-10, FGF-11, FGF-12, FGF-13, FGF-14, and FGF-15.

[0954] In additional embodiments, the Therapeutics of the invention are administered in combination with other therapeutic or prophylactic regimens, such as, for example, radiation therapy.

### Example 14

[0955] Method of Treating Decreased Levels of the Polypeptide

[0956] The present invention relates to a method for treating an individual in need of an increased level of a polypeptide of the invention in the body comprising administering to such an individual a composition comprising a therapeutically effective amount of an agonist of the invention (including polypeptides of the invention). Moreover, it will be appreciated that conditions caused by a decrease in the standard or normal expression level of a polypeptide of the present invention in an individual can be treated by administering the agonist or antagonist of the present invention. Thus, the invention also provides a method of treatment of an individual in need of an increased level of the polypeptide comprising administering to such an individual a Therapeutic comprising an amount of the agonist or antagonist to increase the activity level of the polypeptide in such an individual.

[0957] For example, a patient with decreased levels of a polypeptide receives a daily dose 0.1-100 ug/kg of the agonist or antagonist for six consecutive days. The exact details of the dosing scheme, based on administration and formulation, are provided in Example 13.

### Example 15

[0958] Method of Treating Increased Levels of the Polypeptide

[0959] The present invention also relates to a method of treating an individual in need of a decreased level of a polypeptide of the invention in the body comprising administering to such an individual a composition comprising a therapeutically effective amount of an antagonist of the invention (including polypeptides and antibodies of the invention).

[0960] In one example, antisense technology is used to inhibit production of a polypeptide of the present invention. This technology is one example of a method of decreasing levels of a polypeptide, due to a variety of etiologies, such as cancer.

[0961] For example, a patient diagnosed with abnormally increased levels of a polypeptide is administered intravenously antisense polynucleotides at 0.5, 1.0, 1.5, 2.0 and 3.0 mg/kg day for 21 days. This treatment is repeated after a 7-day rest period if the treatment was well tolerated. The formulation of the antisense polynucleotide is provided in Example 13.

### Example 16

[0962] Method of Treatment Using Gene Therapy-ex Vivo

[0963] One method of gene therapy transplants fibroblasts, which are capable of expressing a polypeptide, onto a patient. Generally, fibroblasts are obtained from a subject by skin biopsy. The resulting tissue is placed in tissue-culture medium and separated into small pieces. Small chunks of the tissue are placed on a wet surface of a tissue culture flask, approximately ten pieces are placed in each flask. The flask is turned upside down, closed tight and left at room temperature over night. After 24 hours at room temperature, the flask is inverted and the chunks of tissue remain fixed to the bottom of the flask and fresh media (e.g., Ham's F12 media, with 10% FBS, penicillin and streptomycin) is added. The flasks are then incubated at 37 degree C for approximately one week.

[0964] At this time, fresh media is added and subsequently changed every several days. After an additional two weeks in culture, a monolayer of fibroblasts emerge. The monolayer is trypsinized and scaled into larger flasks.

[0965] pMV-7 (Kirschmeier, P.T. et al., DNA, 7:219-25 (1988)), flanked by the long terminal repeats of the Moloney murine sarcoma virus, is digested with EcoRI and HindIII and subsequently treated with calf intestinal phosphatase. The linear vector is fractionated on agarose gel and purified, using glass beads.

[0966] The cDNA encoding a polypeptide of the present invention can be amplified using PCR primers which correspond to the 5′ and 3′ end sequences respectively as set forth in Example 1 using primers and having appropriate restriction sites and initiation/stop codons, if necessary. Preferably, the 5′ primer contains an EcoRI site and the 3′ primer includes a HindIII site. Equal quantities of the Moloney murine sarcoma virus linear backbone and the amplified EcoRI and HindIII fragment are added together, in the presence of T4 DNA ligase. The resulting mixture is maintained under conditions appropriate for ligation of the two fragments. The ligation mixture is then used to transform bacteria HB101, which are then plated onto agar containing kanamycin for the purpose of confirming that the vector has the gene of interest properly inserted.

[0967] The amphotropic pA317 or GP+aml2 packaging cells are grown in tissue culture to confluent density in Dulbecco's Modified Eagles Medium (DMEM) with 10% calf serum (CS), penicillin and streptomycin. The MSV vector containing the gene is then added to the media and the packaging cells transduced with the vector. The packaging cells now produce infectious viral particles containing the gene (the packaging cells are now referred to as producer cells).

[0968] Fresh media is added to the transduced producer cells, and subsequently, the media is harvested from a 10 cm plate of confluent producer cells. The spent media, containing the infectious viral particles, is filtered through a millipore filter to remove detached producer cells and this media is then used to infect fibroblast cells. Media is removed from a sub-confluent plate of fibroblasts and quickly replaced with the media from the producer cells. This media is removed and replaced with fresh media. If the titer of virus is high, then virtually all fibroblasts will be infected and no selection is required. If the titer is very low, then it is necessary to use a retroviral vector that has a selectable marker, such as neo or his. Once the fibroblasts have been efficiently infected, the fibroblasts are analyzed to determine whether protein is produced.

[0969] The engineered fibroblasts are then transplanted onto the host, either alone or after having been grown to confluence on cytodex 3 microcarrier beads.

### Example 17

[0970] Gene Therapy using Endogenous Genes Corresponding to Polynucleotides of the Invention

[0971] Another method of gene therapy according to the present invention involves operably associating the endogenous polynucleotide sequence of the invention with a promoter via homologous recombination as described, for example, in U.S. Pat. No.: 5,641,670, issued Jun. 24, 1997; International Publication NO: WO 96/29411, published Sep. 26, 1996; International Publication NO: WO 94/12650, published Aug. 4, 1994; Koller et al., Proc. Natl. Acad. Sci. USA, 86:8932-8935 (1989); and Zijlstra et al., Nature, 342:435-438 (1989). This method involves the activation of a gene which is present in the target cells, but which is not expressed in the cells, or is expressed at a lower level than desired.

[0972] Polynucleotide constructs are made which contain a promoter and targeting sequences, which are homologous to the 5′ non-coding sequence of endogenous polynucleotide sequence, flanking the promoter. The targeting sequence will be sufficiently near the 5′ end of the polynucleotide sequence so the promoter will be operably linked to the endogenous sequence upon homologous recombination. The promoter and the targeting sequences can be amplified using PCR. Preferably, the amplified promoter contains distinct restriction enzyme sites on the 5′ and 3′ ends. Preferably, the 3′ end of the first targeting sequence contains the same restriction enzyme site as the 5′ end of the amplified promoter and the 5′ end of the second targeting sequence contains the same restriction site as the 3′ end of the amplified promoter.

[0973] The amplified promoter and the amplified targeting sequences are digested with the appropriate restriction enzymes and subsequently treated with calf intestinal phosphatase. The digested promoter and digested targeting sequences are added together in the presence of T4 DNA ligase. The resulting mixture is maintained under conditions appropriate for ligation of the two fragments. The construct is size fractionated on an agarose gel then purified by phenol extraction and ethanol precipitation.

[0974] In this Example, the polynucleotide constructs are administered as naked polynucleotides via electroporation. However, the polynucleotide constructs may also be administered with transfection-facilitating agents, such as liposomes, viral sequences, viral particles, precipitating agents, etc. Such methods of delivery are known in the art.

[0975] Once the cells are transfected, homologous recombination will take place which results in the promoter being operably linked to the endogenous polynucleotide sequence. This results in the expression of polynucleotide corresponding to the polynucleotide in the cell. Expression may be detected by immunological staining, or any other method known in the art.

[0976] Fibroblasts are obtained from a subject by skin biopsy. The resulting tissue is placed in DMEM +10% fetal calf serum. Exponentially growing or early stationary phase fibroblasts are trypsinized and rinsed from the plastic surface with nutrient medium. An aliquot of the cell suspension is removed for counting, and the remaining cells are subjected to centrifugation. The supernatant is aspirated and the pellet is resuspended in 5 ml of electroporation buffer (20 mM HEPES pH 7.3, 137 mM NaCl, 5 mM KCl, 0.7 mM Na₂ BPO₄, 6 mM dextrose). The cells are recentrifuged, the supernatant aspirated, and the cells resuspended in electroporation buffer containing 1 mg/ml acetylated bovine serum albumin. The final cell suspension contains approximately 3×10⁶ cells/ml. Electroporation should be performed immediately following resuspension.

[0977] Plasmid DNA is prepared according to standard techniques. For example, to construct a plasmid for targeting to the locus corresponding to the polynucleotide of the invention, plasmid pUC18 (MBI Fermentas, Amherst, N.Y.) is digested with HindIII. The CMV promoter is amplified by PCR with an XbaI site on the 5′ end and a BamHI site on the 3′ end. Two non-coding sequences are amplified via PCR: one non-coding sequence (fragment 1) is amplified with a HindIII site at the 5′ end and an Xba site at the 3′ end; the other non-coding sequence (fragment 2) is amplified with a BamHI site at the 5′ end and a HindIII site at the 3′ end. The CMV promoter and the fragments (1 and 2) are digested with the appropriate enzymes (CMV promoter—XbaI and BamHI; fragment 1—XbaI; fragment 2—BamHI) and ligated together. The resulting ligation product is digested with HindHIII, and ligated with the HindIII-digested pUC18 plasmid.

[0978] Plasmid DNA is added to a sterile cuvette with a 0.4 cm electrode gap (Bio-Rad). The final DNA concentration is generally at least 120 μg/ml. 0.5 ml of the cell suspension (containing approximately 1.5.×10⁶ cells) is then added to the cuvette, and the cell suspension and DNA solutions are gently mixed. Electroporation is performed with a Gene-Pulser apparatus (Bio-Rad). Capacitance and voltage are set at 960 μF and 250-300 V, respectively. As voltage increases, cell survival decreases, but the percentage of surviving cells that stably incorporate the introduced DNA into their genome increases dramatically. Given these parameters, a pulse time of approximately 14-20 mSec should be observed.

[0979] Electroporated cells are maintained at room temperature for approximately 5 min, and the contents of the cuvette are then gently removed with a sterile transfer pipette. The cells are added directly to 10 ml of prewarmed nutrient media (DMEM with 15% calf serum) in a 10 cm dish and incubated at 37 degree C. The following day, the media is aspirated and replaced with 10 ml of fresh media and incubated for a further 16-24 hours.

[0980] The engineered fibroblasts are then injected into the host, either alone or after having been grown to confluence on cytodex 3 microcarrier beads. The fibroblasts now produce the protein product. The fibroblasts can then be introduced into a patient as described above.

### Example 18

[0981] Method of Treatment Using Gene Therapy—In Vivo

[0982] Another aspect of the present invention is using in vivo gene therapy methods to treat disorders, diseases and conditions. The gene therapy method relates to the introduction of naked nucleic acid (DNA, RNA, and antisense DNA or RNA) sequences into an animal to increase or decrease the expression of the polypeptide. The polynucleotide of the present invention may be operatively linked to a promoter or any other genetic elements necessary for the expression of the polypeptide by the target tissue. Such gene therapy and delivery techniques and methods are known in the art, see, for example, WO90/11092, WO98/11779; U.S. Pat. Nos. 5,693,622, 5,705,151, 5,580,859; Tabata et al., Cardiovasc. Res. 35(3):470-479 (1997); Chao et al., Pharmacol. Res. 35(6):517-522 (1997); Wolff, Neuromuscul. Disord. 7(5):314-318 (1997); Schwartz et al., Gene Ther. 3(5):405-411 (1996); Tsurumi et al., Circulation 94(12):3281-3290 (1996) (incorporated herein by reference).

[0983] The polynucleotide constructs may be delivered by any method that delivers injectable materials to the cells of an animal, such as, injection into the interstitial space of tissues (heart, muscle, skin, lung, liver, intestine and the like). The polynucleotide constructs can be delivered in a pharmaceutically acceptable liquid or aqueous carrier.

[0984] The term “naked” polynucleotide, DNA or RNA, refers to sequences that are free from any delivery vehicle that acts to assist, promote, or facilitate entry into the cell, including viral sequences, viral particles, liposome formulations, lipofectin or precipitating agents and the like. However, the polynucleotides of the present invention may also be delivered in liposome formulations (such as those taught in Felgner P. L. et al. (1995) Ann. NY Acad. Sci. 772:126-139 and Abdallah B. et al. (1995) Biol. Cell 85(1):1-7) which can be prepared by methods well known to those skilled in the art.

[0985] The polynucleotide vector constructs used in the gene therapy method are preferably constructs that will not integrate into the host genome nor will they contain sequences that allow for replication. Any strong promoter known to those skilled in the art can be used for driving the expression of DNA. Unlike other gene therapies techniques, one major advantage of introducing naked nucleic acid sequences into target cells is the transitory nature of the polynucleotide synthesis in the cells. Studies have shown that non-replicating DNA sequences can be introduced into cells to provide production of the desired polypeptide for periods of up to six months.

[0986] The polynucleotide construct can be delivered to the interstitial space of tissues within the an animal, including of muscle, skin, brain, lung, liver, spleen, bone marrow, thymus, heart, lymph, blood, bone, cartilage, pancreas, kidney, gall bladder, stomach, intestine, testis, ovary, uterus, rectum, nervous system, eye, gland, and connective tissue. Interstitial space of the tissues comprises the intercellular fluid, mucopolysaccharide matrix among the reticular fibers of organ tissues, elastic fibers in the walls of vessels or chambers, collagen fibers of fibrous tissues, or that same matrix within connective tissue ensheathing muscle cells or in the lacunae of bone. It is similarly the space occupied by the plasma of the circulation and the lymph fluid of the lymphatic channels. Delivery to the interstitial space of muscle tissue is preferred for the reasons discussed below. They may be conveniently delivered by injection into the tissues comprising these cells. They are preferably delivered to and expressed in persistent, non- dividing cells which are differentiated, although delivery and expression may be achieved in non-differentiated or less completely differentiated cells, such as, for example, stem cells of blood or skin fibroblasts. In vivo muscle cells are particularly competent in their ability to take up and express polynucleotides.

[0987] For the naked polynucleotide injection, an effective dosage amount of DNA or RNA will be in the range of from about 0.05 g/kg body weight to about 50 mg/kg body weight. Preferably the dosage will be from about 0.005 mg/kg to about 20 mg/kg and more preferably from about 0.05 mg/kg to about 5 mg/kg. Of course, as the artisan of ordinary skill will appreciate, this dosage will vary according to the tissue site of injection. The appropriate and effective dosage of nucleic acid sequence can readily be determined by those of ordinary skill in the art and may depend on the condition being treated and the route of administration. The preferred route of administration is by the parenteral route of injection into the interstitial space of tissues. However, other parenteral routes may also be used, such as, inhalation of an aerosol formulation particularly for delivery to lungs or bronchial tissues, throat or mucous membranes of the nose. In addition, naked polynucleotide constructs can be delivered to arteries during angioplasty by the catheter used in the procedure.

[0988] The dose response effects of injected polynucleotide in muscle in vivo is determined as follows. Suitable template DNA for production of mRNA coding for polypeptide of the present invention is prepared in accordance with a standard recombinant DNA methodology. The template DNA, which may be either circular or linear, is either used as naked DNA or complexed with liposomes. The quadriceps muscles of mice are then injected with various amounts of the template DNA.

[0989] Five to six week old female and male Balb/C mice are anesthetized by intraperitoneal injection with 0.3 ml of 2.5% Avertin. A 1.5 cm incision is made on the anterior thigh, and the quadriceps muscle is directly visualized. The template DNA is injected in 0.1 ml of carrier in a 1 cc syringe through a 27 gauge needle over one minute, approximately 0.5 cm from the distal insertion site of the muscle into the knee and about 0.2 cm deep. A suture is placed over the injection site for future localization, and the skin is closed with stainless steel clips.

[0990] After an appropriate incubation time (e.g., 7 days) muscle extracts are prepared by excising the entire quadriceps. Every fifth 15 um cross-section of the individual quadriceps muscles is histochemically stained for protein expression. A time course for protein expression may be done in a similar fashion except that quadriceps from different mice are harvested at different times. Persistence of DNA in muscle following injection may be determined by Southern blot analysis after preparing total cellular DNA and HRT supernatants from injected and control mice. The results of the above experimentation in mice can be use to extrapolate proper dosages and other treatment parameters in humans and other animals using naked DNA.

### Example 19

[0991] Transgenic Animals

[0992] The polypeptides of the invention can also be expressed in transgenic animals. Animals of any species, including, but not limited to, mice, rats, rabbits, hamsters, guinea pigs, pigs, micro-pigs, goats, sheep, cows and non-human primates, e.g., baboons, monkeys, and chimpanzees may be used to generate transgenic animals. In a specific embodiment, techniques described herein or otherwise known in the art, are used to express polypeptides of the invention in humans, as part of a gene therapy protocol.

[0993] Any technique known in the art may be used to introduce the transgene (i.e., polynucleotides of the invention) into animals to produce the founder lines of transgenic animals. Such techniques include, but are not limited to, pronuclear microinjection (Paterson et al., Appl. Microbiol. Biotechnol. 40:691-698 (1994); Carver et al., Biotechnology (NY) 11:1263-1270 (1993); Wright et al., Biotechnology (NY) 9:830-834 (1991); and Hoppe et al., U.S. Pat. No. 4,873,191 (1989)); retrovirus mediated gene transfer into germ lines (Van der Putten et al., Proc. Natl. Acad. Sci., USA 82:6148-6152 (1985)), blastocysts or embryos; gene targeting in embryonic stem cells (Thompson et al., Cell 56:313-321 (1989)); electroporation of cells or embryos (Lo, 1983, Mol Cell. Biol. 3:1803-1814 (1983)); introduction of the polynucleotides of the invention using a gene gun (see, e.g., Ulmer et al., Science 259:1745 (1993); introducing nucleic acid constructs into embryonic pleuripotent stem cells and transferring the stem cells back into the blastocyst; and sperm-mediated gene transfer (Lavitrano et al., Cell 57:717-723 (1989); etc. For a review of such techniques, see Gordon, “Transgenic Animals,” Intl. Rev. Cytol. 115:171-229 (1989), which is incorporated by reference herein in its entirety.

[0994] Any technique known in the art may be used to produce transgenic clones containing polynucleotides of the invention, for example, nuclear transfer into enucleated oocytes of nuclei from cultured embryonic, fetal, or adult cells induced to quiescence (Campell et al., Nature 380:64-66 (1996); Wilmut et al., Nature 385:810-813 (1997)).

[0995] The present invention provides for transgenic animals that carry the transgene in all their cells, as well as animals which carry the transgene in some, but not all their cells, i.e., mosaic animals or chimeric. The transgene may be integrated as a single transgene or as multiple copies such as in concatamers, e.g., head-to-head tandems or head-to-tail tandems. The transgene may also be selectively introduced into and activated in a particular cell type by following, for example, the teaching of Lasko et al. (Lasko et al., Proc. Natl. Acad. Sci. USA 89:6232-6236 (1992)). The regulatory sequences required for such a cell-type specific activation will depend upon the particular cell type of interest, and will be apparent to those of skill in the art. When it is desired that the polynucleotide transgene be integrated into the chromosomal site of the endogenous gene, gene targeting is preferred. Briefly, when such a technique is to be utilized, vectors containing some nucleotide sequences homologous to the endogenous gene are designed for the purpose of integrating, via homologous recombination with chromosomal sequences, into and disrupting the function of the nucleotide sequence of the endogenous gene. The transgene may also be selectively introduced into a particular cell type, thus inactivating the endogenous gene in only that cell type, by following, for example, the teaching of Gu et al. (Gu et al., Science 265:103-106 (1994)). The regulatory sequences required for such a cell-type specific inactivation will depend upon the particular cell type of interest, and will be apparent to those of skill in the art.

[0996] Once transgenic animals have been generated, the expression of the recombinant gene may be assayed utilizing standard techniques. Initial screening may be accomplished by Southern blot analysis or PCR techniques to analyze animal tissues to verify that integration of the transgene has taken place. The level of MRNA expression of the transgene in the tissues of the transgenic animals may also be assessed using techniques which include, but are not limited to, Northern blot analysis of tissue samples obtained from the animal, in situ hybridization analysis, and reverse transcriptase-PCR (rt-PCR). Samples of transgenic gene-expressing tissue may also be evaluated immunocytochemically or immunohistochemically using antibodies specific for the transgene product.

[0997] Once the founder animals are produced, they may be bred, inbred, outbred, or crossbred to produce colonies of the particular animal. Examples of such breeding strategies include, but are not limited to: outbreeding of founder animals with more than one integration site in order to establish separate lines; inbreeding of separate lines in order to produce compound transgenics that express the transgene at higher levels because of the effects of additive expression of each transgene; crossing of heterozygous transgenic animals to produce animals homozygous for a given integration site in order to both augment expression and eliminate the need for screening of animals by DNA analysis; crossing of separate homozygous lines to produce compound heterozygous or homozygous lines; and breeding to place the transgene on a distinct background that is appropriate for an experimental model of interest.

[0998] Transgenic animals of the invention have uses which include, but are not limited to, animal model systems useful in elaborating the biological function of polypeptides of the present invention, studying conditions and/or disorders associated with aberrant expression, and in screening for compounds effective in ameliorating such conditions and/or disorders.

### Example 20

[0999] Knock-out Animals

[1000] Endogenous gene expression can also be reduced by inactivating or “knocking out” the gene and/or its promoter using targeted homologous recombination. (E.g., see Smithies et al., Nature 317:230-234 (1985); Thomas & Capecchi, Cell 51:503-512 (1987); Thompson et al., Cell 5:313-321 (1989); each of which is incorporated by reference herein in its entirety). For example, a mutant, non-functional polynucleotide of the invention (or a completely unrelated DNA sequence) flanked by DNA homologous to the endogenous polynucleotide sequence (either the coding regions or regulatory regions of the gene) can be used, with or without a selectable marker and/or a negative selectable marker, to transfect cells that express polypeptides of the invention in vivo. In another embodiment, techniques known in the art are used to generate knockouts in cells that contain, but do not express the gene of interest. Insertion of the DNA construct, via targeted homologous recombination, results in inactivation of the targeted gene. Such approaches are particularly suited in research and agricultural fields where modifications to embryonic stem cells can be used to generate animal offspring with an inactive targeted gene (e.g., see Thomas & Capecchi 1987 and Thompson 1989, supra). However this approach can be routinely adapted for use in humans provided the recombinant DNA constructs are directly administered or targeted to the required site in vivo using appropriate viral vectors that will be apparent to those of skill in the art.

[1001] In further embodiments of the invention, cells that are genetically engineered to express the polypeptides of the invention, or alternatively, that are genetically engineered not to express the polypeptides of the invention (e.g., knockouts) are administered to a patient in vivo. Such cells may be obtained from the patient (i.e., animal, including human) or an MIIC compatible donor and can include, but are not limited to fibroblasts, bone marrow cells, blood cells (e., lymphocytes), adipocytes, muscle cells, endothelial cells etc. The cells are genetically engineered in vitro using recombinant DNA techniques to introduce the coding sequence of polypeptides of the invention into the cells, or alternatively, to disrupt the coding sequence and/or endogenous regulatory sequence associated with the polypeptides of the invention, e.g., by transduction (using viral vectors, and preferably vectors that integrate the transgene into the cell genome) or transfection procedures, including, but not limited to, the use of plasmids, cosmids, YACs, naked DNA, electroporation, liposomes, etc. The coding sequence of the polypeptides of the invention can be placed under the control of a strong constitutive or inducible promoter or promoter/enhancer to achieve expression, and preferably secretion, of the polypeptides of the invention. The engineered cells which express and preferably secrete the polypeptides of the invention can be introduced into the patient systemically, e.g., in the circulation, or intraperitoneally.

[1002] Alternatively, the cells can be incorporated into a matrix and implanted in the body, e.g., genetically engineered fibroblasts can be implanted as part of a skin graft; genetically engineered endothelial cells can be implanted as part of a lymphatic or vascular graft. (See, for example, Anderson et al. U.S. Pat. No. 5,399,349; and Mulligan & Wilson, U.S. Pat. No. 5,460,959 each of which is incorporated by reference herein in its entirety).

[1003] When the cells to be administered are non-autologous or non-MHC compatible cells, they can be administered using well known techniques which prevent the development of a host immune response against the introduced cells. For example, the cells may be introduced in an encapsulated form which, while allowing for an exchange of components with the immediate extracellular environment, does not allow the introduced cells to be recognized by the host immune system.

[1004] Transgenic and “knock-out” animals of the invention have uses which include, but are not limited to, animal model systems useful in elaborating the biological function of polypeptides of the present invention, studying conditions and/or disorders associated with aberrant expression, and in screening for compounds effective in ameliorating such conditions and/or disorders.

### Example 21

[1005] Assays Detecting Stimulation or Inhibition of B cell Proliferation and Differentiation

[1006] Generation of functional humoral immune responses requires both soluble and cognate signaling between B-lineage cells and their microenvironment. Signals may impart a positive stimulus that allows a B-lineage cell to continue its programmed development, or a negative stimulus that instructs the cell to arrest its current developmental pathway. To date, numerous stimulatory and inhibitory signals have been found to influence B cell responsiveness including IL-2, IL-4, IL-5, IL-6, IL-7, IL10, IL-13, IL-14 and IL-15. Interestingly, these signals are by themselves weak effectors but can, in combination with various co-stimulatory proteins, induce activation, proliferation, differentiation, homing, tolerance and death among B cell populations.

[1007] One of the best studied classes of B-cell co-stimulatory proteins is the TNF-superfamily. Within this family CD40, CD27, and CD30 along with their respective ligands CD154, CD70, and CD153 have been found to regulate a variety of immune responses. Assays which allow for the detection and/or observation of the proliferation and differentiation of these B-cell populations and their precursors are valuable tools in determining the effects various proteins may have on these B-cell populations in terms of proliferation and differentiation. Listed below are two assays designed to allow for the detection of the differentiation, proliferation, or inhibition of B-cell populations and their precursors.

[1008] In Vitro Assay

[1009] Agonists or antagonists of the invention can be assessed for its ability to induce activation, proliferation, differentiation or inhibition and/or death in B-cell populations and their precursors. The activity of the agonists or antagonists of the invention on purified human tonsillar B cells, measured qualitatively over the dose range from 0.1 to 10,000 ng/mL, is assessed in a standard B-lymphocyte co-stimulation assay in which purified tonsillar B cells are cultured in the presence of either formalin-fixed Staphylococcus aureus Cowan I (SAC) or immobilized anti-human IgM antibody as the priming agent. Second signals such as IL-2 and IL-15 synergize with SAC and IgM crosslinking to elicit B cell proliferation as measured by tritiated-thymidine incorporation. Novel synergizing agents can be readily identified using this assay. The assay involves isolating human tonsillar B cells by magnetic bead (MACS) depletion of CD3-positive cells. The resulting cell population is greater than 95% B cells as assessed by expression of CD45B220).

[1010] Various dilutions of each sample are placed into individual wells of a 96-well plate to which are added 10⁵ B-cells suspended in culture medium (RPMI 1640 containing 10% FBS, 5×10⁻⁵M 2ME, lOOU/ml penicillin, lOug/ml streptomycin, and 10⁻⁵ dilution of SAC) in a total volume of 150 ul. Proliferation or inhibition is quantitated by a 20 h pulse (luCi/well) with 3H-thymidine (6.7 Ci/mM) beginning 72 h post factor addition. The positive and negative controls are IL2 and medium respectively.

[1011] In Vivo Assay- BALB/c mice are injected (i.p.) twice per day with buffer only, or 2 mg/Kg of agonists or antagonists of the invention, or truncated forms thereof. Mice receive this treatment for 4 consecutive days, at which time they are sacrificed and various tissues and serum collected for analyses. Comparison of H&E sections from normal spleens and spleens treated with agonists or antagonists of the invention identify the results of the activity of the agonists or antagonists on spleen cells, such as the diffusion of peri-arterial lymphatic sheaths, and/or significant increases in the nucleated cellularity of the red pulp regions, which may indicate the activation of the differentiation and proliferation of B-cell populations. Immunohistochemical studies using a B cell marker, anti-CD45B220), are used to determine whether any physiological changes to splenic cells, such as splenic disorganization, are due to increased B-cell representation within loosely defined B-cell zones that infiltrate established T-cell regions.

[1012] Flow cytometric analyses of the spleens from mice treated with agonist or antagonist is used to indicate whether the agonists or antagonists specifically increases the proportion of ThB+, CD45B220)dull B cells over that which is observed in control mice. Likewise, a predicted consequence of increased mature B-cell representation in vivo is a relative increase in serum Ig titers. Accordingly, serum IgM and IgA levels are compared between buffer and agonists or antagonists-treated mice.

[1013] The studies described in this example tested activity of agonists or antagonists of the invention. However, one skilled in the art could easily modify the exemplified studies to test the activity of polynucleotides or polypeptides of the invention (e.g., gene therapy).

### Example 22

[1014] T Cell Proliferation Assay

[1015] A CD3-induced proliferation assay is performed on PBMCs and is measured by the uptake of ³H-thymidine. The assay is performed as follows. Ninety-six well plates are coated with 100 μ/well of mAb to CD3 (HIf3a, Pharmingen) or isotype-matched control mAb (B33.1) overnight at 4 degrees C (1 μg/ml in 0.05M bicarbonate buffer, pH 9.5), then washed three times with PBS. PBMC are isolated by F/H gradient centrifugation from human peripheral blood and added to quadruplicate wells (5×1^{04/}well) of mAb coated plates in RPMI containing 10% FCS and P/S in the presence of varying concentrations of agonists or antagonists of the invention (total volume 200 ul). Relevant protein buffer and medium alone are controls. After 48 hr. culture at 37 degrees C, plates are spun for 2 min. at 1000 rpm and 100 μl of supernatant is removed and stored −20 degrees C for measurement of IL-2 (or other cytokines) if effect on proliferation is observed. Wells are supplemented with 100 ul of medium containing 0.5 uCi of ³H-thymidine and cultured at 37 degrees C for 18-24 hr. Wells are harvested and incorporation of ³H-thymidine used as a measure of proliferation. Anti-CD3 alone is the positive control for proliferation. IL-2 (100 U/ml) is also used as a control which enhances proliferation. Control antibody which does not induce proliferation of T cells is used as the negative controls for the effects of agonists or antagonists of the invention.

[1016] The studies described in this example tested activity of agonists or antagonists of the invention. However, one skilled in the art could easily modify the exemplified studies to test the activity of polynucleotides or polypeptides of the invention (e.g., gene therapy).

### Example 23

[1017] Effect of Agonists or Antagonists of the Invention on the Expression of MHC Class II, Costimulatory and Adhesion Molecules and Cell Differentiation of Monocytes and Monocyte-Derived Human Dendritic Cells

[1018] Dendritic cells are generated by the expansion of proliferating precursors found in the peripheral blood: adherent PBMC or elutriated monocytic fractions are cultured for 7-10 days with GM-CSF (50 ng/ml) and IL-4 (20 ng/ml). These dendritic cells have the characteristic phenotype of immature cells (expression of CD1, CD80, CD86, CD40 and MHC class II antigens). Treatment with activating factors, such as TNF-α, causes a rapid change in surface phenotype (increased expression of MHC class I and II, costimulatory and adhesion molecules, downregulation of FCyRII, upregulation of CD83). These changes correlate with increased antigen-presenting capacity and with functional maturation of the dendritic cells.

[1019] FACS analysis of surface antigens is performed as follows. Cells are treated 1-3 days with increasing concentrations of agonist or antagonist of the invention or LPS (positive control), washed with PBS containing 1% BSA and 0.02 mM sodium azide, and then incubated with 1:20 dilution of appropriate FITC- or PE-labeled monoclonal antibodies for 30 minutes at 4 degrees C. After an additional wash, the labeled cells are analyzed by flow cytometry on a FACScan (Becton Dickinson).

[1020] Effect on the Production of Cytokines.

[1021] Cytokines generated by dendritic cells, in particular IL-12, are important in the initiation of T-cell dependent immune responses. IL-12 strongly influences the development of Thl helper T-cell immune response, and induces cytotoxic T and NK cell function. An ELISA is used to measure the IL-12 release as follows. Dendritic cells (10⁶/ml) are treated with increasing concentrations of agonists or antagonists of the invention for 24 hours. LPS (100 ng/ml) is added to the cell culture as positive control. Supernatants from the cell cultures are then collected and analyzed for IL-12 content using commercial ELISA kit (e.g, R & D Systems (Minneapolis, Minn.)). The standard protocols provided with the kits are used.

[1022] Effect on the expression of MHC Class II, Costimulatory and Adhesion Molecules.

[1023] Three major families of cell surface antigens can be identified on monocytes: adhesion molecules, molecules involved in antigen presentation, and Fc receptor. Modulation of the expression of MHC class II antigens and other costimulatory molecules, such as B7 and ICAM-1, may result in changes in the antigen presenting capacity of monocytes and ability to induce T cell activation. Increase expression of Fc receptors may correlate with improved monocyte cytotoxic activity, cytokine release and phagocytosis.

[1024] FACS analysis is used to examine the surface antigens as follows. Monocytes are treated 1-5 days with increasing concentrations of agonists or antagonists of the invention or LPS (positive control), washed with PBS containing 1% BSA and 0.02 mM sodium azide, and then incubated with 1:20 dilution of appropriate FITC- or PE-labeled monoclonal antibodies for 30 minutes at 4 degreesC. After an additional wash, the labeled cells are analyzed by flow cytometry on a FACScan (Becton Dickinson).

[1025] Monocyte Activation and/or Increased Survival.

[1026] Assays for molecules that activate (or alternatively, inactivate) monocytes and/or increase monocyte survival (or alternatively, decrease monocyte survival) are known in the art and may routinely be applied to determine whether a molecule of the invention functions as an inhibitor or activator of monocytes. Agonists or antagonists of the invention can be screened using the three assays described below. For each of these assays, Peripheral blood mononuclear cells (PBMC) are purified from single donor leukopacks (American Red Cross, Baltimore, Md.) by centrifugation through a Histopaque gradient (Sigma). Monocytes are isolated from PBMC by counterflow centrifugal elutriation.

[1027] Monocyte Survival Assay.

[1028] Human peripheral blood monocytes progressively lose viability when cultured in absence of serum or other stimuli. Their death results from internally regulated process (apoptosis). Addition to the culture of activating factors, such as TNF-alpha dramatically improves cell survival and prevents DNA fragmentation. Propidium iodide (PI) staining is used to measure apoptosis as follows. Monocytes are cultured for 48 hours in polypropylene tubes in serum-free medium (positive control), in the presence of 100 ng/ml TNF-alpha (negative control), and in the presence of varying concentrations of the compound to be tested. Cells are suspended at a concentration of 2×10⁶ ml in PBS containing PI at a final concentration of 5 μg/ml, and then incubaed at room temperature for 5 minutes before FACScan analysis. PI uptake has been demonstrated to correlate with DNA fragmentation in this experimental paradigm.

[1029] Effect on Cytokine Release.

[1030] An important function of monocytes/macrophages is their regulatory activity on other cellular populations of the immune system through the release of cytokines after stimulation. An ELISA to measure cytokine release is performed as follows. Human monocytes are incubated at a density of 5×10⁵ cells/ml with increasing concentrations of agonists or antagonists of the invention and under the same conditions, but in the absence of agonists or antagonists. For IL-12 production, the cells are primed overnight with IFN (100 U/ml) in presence of agonist or antagonist of the invention. LPS (10 ng/ml) is then added. Conditioned media are collected after 24h and kept frozen until use. Measurement of TNF-alpha, IL-10, MCP-1 and IL-8 is then performed using a commercially available ELISA kit (e.g, R & D Systems (Minneapolis, Minn.)) and applying the standard protocols provided with the kit.

[1031] Oxidative Burst.

[1032] Purified monocytes are plated in 96-w plate at 2-1×10⁵ cell/well. Increasing concentrations of agonists or antagonists of the invention are added to the wells in a total volume of 0.2 ml culture medium (RPMI 1640+10% FCS, glutamine and antibiotics). After 3 days incubation, the plates are centrifuged and the medium is removed from the wells. To the macrophage monolayers, 0.2 ml per well of phenol red solution (140 mM NaCl, 10 mM potassium phosphate buffer pH 7.0, 5.5 mM dextrose, 0.56 mM phenol red and 19 U/ml of HRPO) is added, together with the stimulant (200 nM PMA). The plates are incubated at 37° C. for 2 hours and the reaction is stopped by adding 20 μl iN NaOH per well. The absorbance is read at 610 nm. To calculate the amount of H₂O₂ produced by the macrophages, a standard curve of a H₂O₂ solution of known molarity is performed for each experiment.

[1033] The studies described in this example tested activity of agonists or antagonists of the invention. However, one skilled in the art could easily modify the exemplified studies to test the activity of polynucleotides or polypeptides of the invention (e.g., gene therapy).

### Example 24

[1034] Biological Effects of Agonists or Antagonists of the Invention Astrocyte and Neuronal Assays.

[1035] Agonists or antagonists of the invention, expressed in Escherichia coli and purified as described above, can be tested for activity in promoting the survival, neurite outgrowth, or phenotypic differentiation of cortical neuronal cells and for inducing the proliferation of glial fibrillary acidic protein immunopositive cells, astrocytes. The selection of cortical cells for the bioassay is based on the prevalent expression of PGF-1 and FGF-2 in cortical structures and on the previously reported enhancement of cortical neuronal survival resulting from FGF-2 treatment. A thymidine incorporation assay, for example, can be used to elucidate an agonist or antagonist of the invention's activity on these cells.

[1036] Moreover, previous reports describing the biological effects of FGF-2 (basic FGF) on cortical or hippocampal neurons in vitro have demonstrated increases in both neuron survival and neurite outgrowth (Walicke et al., “Fibroblast growth factor promotes survival of dissociated hippocampal neurons and enhances neurite extension.” Proc. Natl. Acad. Sci. USA 83:3012-3016. (1986), assay herein incorporated by reference in its entirety). However, reports from experiments done on PC-12 cells suggest that these two responses are not necessarily synonymous and may depend on not only which FGF is being tested but also on which receptos) are expressed on the target cells. Using the primary cortical neuronal culture paradigm, the ability of an agonist or antagonist of the invention to induce neurite outgrowth can be compared to the response achieved with FGF-2 using, for example, a thymidine incorporation assay.

[1037] Fibroblast and Endothelial Cell Assays.

[1038] Human lung fibroblasts are obtained from Clonetics (San Diego, Calif.) and maintained in growth media from Clonetics. Dermal microvascular endothelial cells are obtained from Cell Applications (San Diego, Calif.). For proliferation assays, the human lung fibroblasts and dermal microvascular endothelial cells can be cultured at 5,000 cells/well in a 96-well plate for one day in growth medium. The cells are then incubated for one day in 0.1% BSA basal medium. After replacing the medium with fresh 0.1% BSA medium, the cells are incubated with the test proteins for 3 days. Alamar Blue (Alamar Biosciences, Sacramento, Calif.) is added to each well to a final concentration of 10%. The cells are incubated for 4 hr. Cell viability is measured by reading in a CytoFluor fluorescence reader. For the PGE₂ assays, the human lung fibroblasts are cultured at 5,000 cells/well in a 96-well plate for one day. After a medium change to 0.1% BSA basal medium, the cells are incubated with FGF-2 or agonists or antagonists of the invention with or without IL-1α for 24 hours. The supernatants are collected and assayed for PGE₂ by EIA kit (Cayman, Ann Arbor, Mich.). For the IL-6 assays, the human lung fibroblasts are cultured at 5,000 cells/well in a 96-well plate for one day. After a medium change to 0.1% BSA basal medium, the cells are incubated with FGF-2 or with or without agonists or antagonists of the invention IL-1α for 24 hours. The supernatants are collected and assayed for IL-6 by ELISA kit (Endogen, Cambridge, Mass.).

[1039] Human lung fibroblasts are cultured with FGF-2 or agonists or antagonists of the invention for 3 days in basal medium before the addition of Alamar Blue to assess effects on growth of the fibroblasts. FGF-2 should show a stimulation at 10-2500 ng/mil which can be used to compare stimulation with agonists or antagonists of the invention.

[1040] Parkinson Models.

[1041] The loss of motor function in Parkinson's disease is attributed to a deficiency of striatal dopamine resulting from the degeneration of the nigrostriatal dopaminergic projection neurons. An animal model for Parkinson's that has been extensively characterized involves the systemic administration of 1-methyl-4 phenyl 1,2,3,6-tetrahydropyridine (MPTP). In the CNS, MPTP is taken-up by astrocytes and catabolized by monoamine oxidase B to 1-methyl-4-phenyl pyridine (MPP⁺) and released. Subsequently, MPP⁺ is actively accumulated in dopaminergic neurons by the high-affinity reuptake transporter for dopamine. MPP⁺ is then concentrated in mitochondria by the electrochemical gradient and selectively inhibits nicotidamide adenine disphosphate: ubiquinone oxidoreductionase (complex I), thereby interfering with electron transport and eventually generating oxygen radicals.

[1042] It has been demonstrated in tissue culture paradigms that FGF-2 (basic FGF) has trophic activity towards nigral dopaminergic neurons (Ferrari et al., Dev. Biol. 1989). Recently, Dr. Unsicker's group has demonstrated that administering FGF-2 in gel foam implants in the striatum results in the near complete protection of nigral dopaminergic neurons from the toxicity associated with MPTP exposure (Otto and Unsicker, J. Neuroscience, 1990).

[1043] Based on the data with FGF-2, agonists or antagonists of the invention can be evaluated to determine whether it has an action similar to that of FGF-2 in enhancing dopaminergic neuronal survival in vitro and it can also be tested in vivo for protection of dopaminergic neurons in the striatum from the damage associated with MPTP treatment. The potential effect of an agonist or antagonist of the invention is first examined in vitro in a dopaminergic neuronal cell culture paradigm. The cultures are prepared by dissecting the midbrain floor plate from gestation day 14 Wistar rat embryos. The tissue is dissociated with trypsin and seeded at a density of 200,000 cells/cm2 on polyorthinine-laminin coated glass coverslips. The cells are maintained in Dulbecco's Modified Eagle's medium and F12 medium containing hormonal supplements (N1). The cultures are fixed with paraformaldehyde after 8 days in vitro and are processed for tyrosine hydroxylase, a specific marker for dopminergic neurons, immunohistochemical staining. Dissociated cell cultures are prepared from embryonic rats. The culture medium is changed every third day and the factors are also added at that time.

[1044] Since the dopaminergic neurons are isolated from animals at gestation day 14, a developmental time which is past the stage when the dopaminergic precursor cells are proliferating, an increase in the number of tyrosine hydroxylase immunopositive neurons would represent an increase in the number of dopaminergic neurons surviving in vitro. Therefore, if an agonist or antagonist of the invention acts to prolong the survival of dopaminergic neurons, it would suggest that the agonist or antagonist may be involved in Parkinson's Disease.

[1045] The studies described in this example tested activity of agonists or antagonists of the invention. However, one skilled in the art could easily modify the exemplified studies to test the activity of polynucleotides or polypeptides of the invention (e.g., gene therapy).

### Example 25

[1046] The Effect of Agonists or Antagonists of the Invention on the Growth of Vascular Endothelial Cells

[1047] On day 1, human umbilical vein endothelial cells (HUVEC) are seeded at 2-5×10⁴ cells/35 mm dish density in M199 medium containing 4% fetal bovine serum (FBS), 16 units/ml heparin, and 50 units/ml endothelial cell growth supplements (ECGS, Biotechnique, Inc.). On day 2, the medium is replaced with M199 containing 10% FBS, 8 units/ml heparin. An agonist or antagonist of the invention, and positive controls, such as VEGF and basic FGF (bFGF) are added, at varying concentrations. On days 4 and 6, the medium is replaced. On day 8, cell number is determined with a Coulter Counter.

[1048] An increase in the number of HUVEC cells indicates that the compound of the invention may proliferate vascular endothelial cells, while a decrease in the number of HUVEC cell indicates that the compound of the invention inhibits vascular endothelial cells.

[1049] The studies described in this example tested activity of a polypeptide of the invention. However, one skilled in the art could easily modify the exemplified studies to test the activity of polynucleotides (e.g., gene therapy), agonists, and/or antagonists of the invention.

### Example 26

[1050] Rat Corneal Wound Healing Model

[1051] This animal model shows the effect of an agonist or antagonist of the invention on neovascularization. The experimental protocol includes:

[1052] a) Making a 1-1.5 mm long incision from the center of cornea into the stromal layer.

[1053] b) Inserting a spatula below the lip of the incision facing the outer corner of the eye.

[1054] c) Making a pocket (its base is 1-1.5 mm form the edge of the eye).

[1055] d) Positioning a pellet, containing 50 ng- Sug of an agonist or antagonist of the invention, within the pocket.

[1056] e) Treatment with an agonist or antagonist of the invention can also be applied topically to the corneal wounds in a dosage range of 20 mg -500 mg (daily treatment for five days).

[1057] The studies described in this example tested activity of agonists or antagonists of the invention. However, one skilled in the art could easily modify the exemplified studies to test the activity of polynucleotides or polypeptides of the invention (e.g., gene therapy).

### Example 27

[1058] Diabetic Mouse and Glucocorticoid-impaired Wound Healing Models

[1059] A. Diabetic db+/db+ Mouse Model.

[1060] To demonstrate that an agonist or antagonist of the invention accelerates the healing process, the genetically diabetic mouse model of wound healing is used. The full thickness wound healing model in the db+/db+ mouse is a well characterized, clinically relevant and reproducible model of impaired wound healing. Healing of the diabetic wound is dependent on formation of granulation tissue and re-epithelialization rather than contraction (Gartner, M. H. et al., J. Surg. Res. 52:389 (1992); Greenhalgh, D. G. et al., Am. J. Pathol. 136:1235 (1990)).

[1061] The diabetic animals have many of the characteristic features observed in Type II diabetes mellitus. Homozygous (db+/db+) mice are obese in comparison to their normal heterozygous (db+/+m) littermates. Mutant diabetic (db+/db+) mice have a single autosomal recessive mutation on chromosome 4 (db+) (Coleman et al. Proc. Natl. Acad. Sci. USA 77:283-293 (1982)). Animals show polyphagia, polydipsia and polyuria. Mutant diabetic mice (db+/db+) have elevated blood glucose, increased or normal insulin levels, and suppressed cell-mediated immunity (Mandel et al., J. Immunol. 120:1375 (1978); Debray-Sachs, M. et al., Clin. Exp. Immunol. 51(1):1-7 (1983); Leiter et al., Am. J. of Pathol. 114:46-55 (1985)). Peripheral neuropathy, myocardial complications, and microvascular lesions, basement membrane thickening and glomerular filtration abnormalities have been described in these animals (Norido, F. et al., Exp. Neurol. 83(2):221-232 (1984); Robertson et al., Diabetes 29(1):60-67 (1980); Giacomelli et al., Lab Invest. 40(4):460-473 (1979); Coleman, D. L., Diabetes 31 (Suppl):1-6 (1982)). These homozygous diabetic mice develop hyperglycemia that is resistant to insulin analogous to human type II diabetes (Mandel et al., J. Immunol. 120:1375-1377 (1978)).

[1062] The characteristics observed in these animals suggests that healing in this model may be similar to the healing observed in human diabetes (Greenhalgh, et al., Am. J. of Pathol. 136:1235-1246 (1990)).

[1063] Genetically diabetic female C57BL/KsJ (db+/db+) mice and their non-diabetic (db+/+m) heterozygous littermates are used in this study (Jackson Laboratories). The animals are purchased at 6 weeks of age and are 8 weeks old at the beginning of the study. Animals are individually housed and received food and water ad libitum. All manipulations are performed using aseptic techniques. The experiments are conducted according to the rules and guidelines of Human Genome Sciences, Inc. Institutional Animal Care and Use Committee and the Guidelines for the Care and Use of Laboratory Animals.

[1064] Wounding protocol is performed according to previously reported methods (Tsuboi, R. and Rifkin, D. B., J. Exp. Med. 172:245-251 (1990)). Briefly, on the day of wounding, animals are anesthetized with an intraperitoneal injection of Avertin (0.01 mg/mL), 2,2,2-tribromoethanol and 2-methyl-2-butanol dissolved in deionized water. The dorsal region of the animal is shaved and the skin washed with 70% ethanol solution and iodine. The surgical area is dried with sterile gauze prior to wounding. An 8 mm full-thickness wound is then created using a Keyes tissue punch. Immediately following wounding, the surrounding skin is gently stretched to eliminate wound expansion. The wounds are left open for the duration of the experiment. Application of the treatment is given topically for 5 consecutive days commencing on the day of wounding. Prior to treatment, wounds are gently cleansed with sterile saline and gauze sponges.

[1065] Wounds are visually examined and photographed at a fixed distance at the day of surgery and at two day intervals thereafter. Wound closure is determined by daily measurement on days 1-5 and on day 8. Wounds are measured horizontally and vertically using a calibrated Jameson caliper. Wounds are considered healed if granulation tissue is no longer visible and the wound is covered by a continuous epithelium.

[1066] An agonist or antagonist of the invention is administered using at a range different doses, from 4 mg to 500 mg per wound per day for 8 days in vehicle. Vehicle control groups received 50 mL of vehicle solution.

[1067] Animals are euthanized on day 8 with an intraperitoneal injection of sodium pentobarbital (300 mg/kg). The wounds and surrounding skin are then harvested for histology and immunohistochemistry. Tissue specimens are placed in 10% neutral buffered formalin in tissue cassettes between biopsy sponges for further processing. Three groups of 10 animals each (5 diabetic and 5 non-diabetic controls) are evaluated: 1) Vehicle placebo control, 2) untreated group, and 3) treated group. Wound closure is analyzed by measuring the area in the vertical and horizontal axis and obtaining the total square area of the wound. Contraction is then estimated by establishing the differences between the initial wound area (day 0) and that of post treatment (day 8). The wound area on day 1 is 64 mm², the corresponding size of the dermal punch. Calculations are made using the following formula:

[Open area on day 8]−[Open area on day 1]/[Open area on day 1]

[1068] Specimens are fixed in 10% buffered formalin and paraffin embedded blocks are sectioned perpendicular to the wound surface (5 mm) and cut using a Reichert-Jung microtome. Routine hematoxylin-eosin (H&E) staining is performed on cross-sections of bisected wounds. Histologic examination of the wounds are used to assess whether the healing process and the morphologic appearance of the repaired skin is altered by treatment with an agonist or antagonist of the invention. This assessment included verification of the presence of cell accumulation, inflammatory cells, capillaries, fibroblasts, re-epithelialization and epidermal maturity (Greenhalgh, D.G. et al., Am. J. Pathol. 136:1235 (1990)). A calibrated lens micrometer is used by a blinded observer.

[1069] Tissue sections are also stained immunohistochemically with a polyclonal rabbit anti-human keratin antibody using ABC Elite detection system. Human skin is used as a positive tissue control while non-immune IgG is used as a negative control. Keratinocyte growth is determined by evaluating the extent of reepithelialization of the wound using a calibrated lens micrometer.

[1070] Proliferating cell nuclear antigen/cyclin (PCNA) in skin specimens is demonstrated by using anti-PCNA antibody (1:50) with an ABC Elite detection system. Human colon cancer served as a positive tissue control and human brain tissue is used as a negative tissue control. Each specimen included a section with omission of the primary antibody and substitution with non-immune mouse IgG. Ranking of these sections is based on the extent of proliferation on a scale of 0-8, the lower side of the scale reflecting slight proliferation to the higher side reflecting intense proliferation.

[1071] Experimental data are analyzed using an unpaired t test. A p value of <0.05 is considered significant.

[1072] B. Steroid Impaired Rat Model

[1073] The inhibition of wound healing by steroids has been well documented in various in vitro and in vivo systems (Wahl, Glucocorticoids and Wound healing. In: Anti- Inflammatory Steroid Action: Basic and Clinical Aspects. 280-302 (1989); Wahlet al., J. Immunol. 115: 476-481 (1975); Werb et al., J. Exp. Med. 147:1684-1694 (1978)). Glucocorticoids retard wound healing by inhibiting angiogenesis, decreasing vascular permeability (Ebert et al., An. Intern. Med. 37:701-705 (1952)), fibroblast proliferation, and collagen synthesis (Beck et al., Growth Factors. 5: 295-304 (1991); Haynes et al., J. Clin. Invest. 61: 703-797 (1978)) and producing a transient reduction of circulating monocytes (Haynes et al., J. Clin. Invest. 61: 703-797 (1978); Wahl, “Glucocorticoids and wound healing”, In: Antiinflammatory Steroid Action: Basic and Clinical Aspects, Academic Press, New York, pp. 280-302 (1989)). The systemic administration of steroids to impaired wound healing is a well establish phenomenon in rats (Beck et al., Growth Factors. 5: 295-304 (1991); Haynes et al., J. Clin. Invest. 61: 703-797 (1978); Wahl, “Glucocorticoids and wound healing”, In: Antiinflammatory Steroid Action: Basic and Clinical Aspects, Academic Press, New York, pp. 280-302 (1989); Pierce et al., Proc. Natl. Acad. Sci. USA 86: 2229-2233 (1989)).

[1074] To demonstrate that an agonist or antagonist of the invention can accelerate the healing process, the effects of multiple topical applications of the agonist or antagonist on full thickness excisional skin wounds in rats in which healing has been impaired by the systemic administration of methylprednisolone is assessed.

[1075] Young adult male Sprague Dawley rats weighing 250-300 g (Charles River Laboratories) are used in this example. The animals are purchased at 8 weeks of age and are 9 weeks old at the beginning of the study. The healing response of rats is impaired by the systemic administration of methylprednisolone (17 mg/kg/rat intramuscularly) at the time of wounding. Animals are individually housed and received food and water ad libitum. All manipulations are performed using aseptic techniques. This study is conducted according to the rules and guidelines of Human Genome Sciences, Inc. Institutional Animal Care and Use Committee and the Guidelines for the Care and Use of Laboratory Animals.

[1076] The wounding protocol is followed according to section A, above. On the day of wounding, animals are anesthetized with an intramuscular injection of ketamine (50 mg/kg) and xylazine (5 mg/kg). The dorsal region of the animal is shaved and the skin washed with 70% ethanol and iodine solutions. The surgical area is dried with sterile gauze prior to wounding. An 8 mm full-thickness wound is created using a Keyes tissue punch. The wounds are left open for the duration of the experiment. Applications of the testing materials are given topically once a day for 7 consecutive days commencing on the day of wounding and subsequent to methylprednisolone administration. Prior to treatment, wounds are gently cleansed with sterile saline and gauze sponges.

[1077] Wounds are visually examined and photographed at a fixed distance at the day of wounding and at the end of treatment. Wound closure is determined by daily measurement on days 1-5 and on day 8. Wounds are measured horizontally and vertically using a calibrated Jameson caliper. Wounds are considered healed if granulation tissue is no longer visible and the wound is covered by a continuous epithelium.

[1078] The agonist or antagonist of the invention is administered using at a range different doses, from 4 mg to 500mg per wound per day for 8 days in vehicle. Vehicle control groups received 50 mL of vehicle solution.

[1079] Animals are euthanized on day 8 with an intraperitoneal injection of sodium pentobarbital (300 mg/kg). The wounds and surrounding skin are then harvested for histology. Tissue specimens are placed in 10% neutral buffered formalin in tissue cassettes between biopsy sponges for further processing.

[1080] Four groups of 10 animals each (5 with methylprednisolone and 5 without glucocorticoid) are evaluated: 1) Untreated group 2) Vehicle placebo control 3) treated groups.

[1081] Wound closure is analyzed by measuring the area in the vertical and horizontal axis and obtaining the total area of the wound. Closure is then estimated by establishing the differences between the initial wound area (day 0) and that of post treatment (day 8). The wound area on day 1 is 64 mm2, the corresponding size of the dermal punch. Calculations are made using the following formula:

[Open area on day 8]−[Open area on day 1]/[Open area on day 1]

[1082] Specimens are fixed in 10% buffered formalin and paraffin embedded blocks are sectioned perpendicular to the wound surface (5 mm) and cut using an Olympus microtome. Routine hematoxylin-eosin (H&E) staining is performed on cross-sections of bisected wounds. Histologic examination of the wounds allows assessment of whether the healing process and the morphologic appearance of the repaired skin is improved by treatment with an agonist or antagonist of the invention. A calibrated lens micrometer is used by a blinded observer to determine the distance of the wound gap.

[1083] Experimental data are analyzed using an unpaired t test. A p value of <0.05 is considered significant.

[1084] The studies described in this example tested activity of agonists or antagonists of the invention. However, one skilled in the art could easily modify the exemplified studies to test the activity of polynucleotides or polypeptides of the invention (e.g., gene therapy).

### Example 28

[1085] Lymphadema Animal Model

[1086] The purpose of this experimental approach is to create an appropriate and consistent lymphedema model for testing the therapeutic effects of an agonist or antagonist of the invention in lymphangiogenesis and re-establishment of the lymphatic circulatory system in the rat hind limb. Effectiveness is measured by swelling volume of the affected limb, quantification of the amount of lymphatic vasculature, total blood plasma protein, and histopathology. Acute lymphedema is observed for 7-10 days. Perhaps more importantly, the chronic progress of the edema is followed for up to 3-4 weeks.

[1087] Prior to beginning surgery, blood sample is drawn for protein concentration analysis. Male rats weighing approximately ˜350 g are dosed with Pentobarbital. Subsequently, the right legs are shaved from knee to hip. The shaved area is swabbed with gauze soaked in 70% EtOH. Blood is drawn for serum total protein testing. Circumference and volumetric measurements are made prior to injecting dye into paws after marking 2 measurement levels (0.5 cm above heel, at mid-pt of dorsal paw). The intradermal dorsum of both right and left paws are injected with 0.05 ml of 1% Evan's Blue. Circumference and volumetric measurements are then made following injection of dye into paws.

[1088] Using the knee joint as a landmark, a mid-leg inguinal incision is made circumferentially allowing the femoral vessels to be located. Forceps and hemostats are used to dissect and separate the skin flaps. After locating the femoral vessels, the lymphatic vessel that runs along side and underneath the vesses) is located. The main lymphatic vessels in this area are then electrically coagulated or suture ligated.

[1089] Using a microscope, muscles in back of the leg (near the semitendinosis and adductors) are bluntly dissected. The popliteal lymph node is then located. The 2 proximal and 2 distal lymphatic vessels and distal blood supply of the popliteal node are then and ligated by suturing. The popliteal lymph node, and any accompanying adipose tissue, is then removed by cutting connective tissues.

[1090] Care is taken to control any mild bleeding resulting from this procedure. After lymphatics are occluded, the skin flaps are sealed by using liquid skin (Vetbond) (A J Buck). The separated skin edges are sealed to the underlying muscle tissue while leaving a gap of ˜0.5 cm around the leg. Skin also may be anchored by suturing to underlying muscle when necessary.

[1091] To avoid infection, animals are housed individually with mesh (no bedding). Recovering animals are checked daily through the optimal edematous peak, which typically occurred by day 5-7. The plateau edematous peak are then observed. To evaluate the intensity of the lymphedema, the circumference and volumes of 2 designated places on each paw before operation and daily for 7 days are measured. The effect plasma proteins on lymphedema is determined and whether protein analysis is a useful testing perimeter is also investigated. The weights of both control and edematous limbs are evaluated at 2 places. Analysis is performed in a blind manner.

[1092] Circumference Measurements: Under brief gas anesthetic to prevent limb movement, a cloth tape is used to measure limb circumference. Measurements are done at the ankle bone and dorsal paw by 2 different people then those 2 readings are averaged. Readings are taken from both control and edematous limbs.

[1093] Volumetric Measurements: On the day of surgery, animals are anesthetized with Pentobarbital and are tested prior to surgery. For daily volumetrics animals are under brief halothane anesthetic (rapid immobilization and quick recovery), both legs are shaved and equally marked using waterproof marker on legs. Legs are first dipped in water, then dipped into instrument to each marked level then measured by Buxco edema softwarChen/Victor). Data is recorded by one person, while the other is dipping the limb to marked area.

[1094] Blood-plasma protein measurements: Blood is drawn, spun, and serum separated prior to surgery and then at conclusion for total protein and Ca2+0 comparison.

[1095] Limb Weight Comparison: After drawing blood, the animal is prepared for tissue collection. The limbs are amputated using a quillitine, then both experimental and control legs are cut at the ligature and weighed. A second weighing is done as the tibiocacaneal joint is disarticulated and the foot is weighed.

[1096] Histological Preparations: The transverse muscle located behind the knee (popliteal) area is dissected and arranged in a metal mold, filled with freezeGel, dipped into cold methylbutane, placed into labeled sample bags at −80 EC until sectioning. Upon sectioning, the muscle is observed under fluorescent microscopy for lymphatics.

[1097] The studies described in this example tested activity of agonists or antagonists of the invention. However, one skilled in the art could easily modify the exemplified studies to test the activity of polynucleotides or polypeptides of the invention (e.g., gene therapy).

### Example 29

[1098] Suppression of TNF Alpha-induced Adhesion Molecule Expression by a Agonist or Antagonist of the Invention

[1099] The recruitment of lymphocytes to areas of inflammation and angiogenesis involves specific receptor-ligand interactions between cell surface adhesion molecules (CAMs) on lymphocytes and the vascular endothelium. The adhesion process, in both normal and pathological settings, follows a multi-step cascade that involves intercellular adhesion molecule-1 (ICAM-1), vascular cell adhesion molecule-1 (VCAM-1), and endothelial leukocyte adhesion molecule-1 (E-selectin) expression on endothelial cells (EC). The expression of these molecules and others on the vascular endothelium determines the efficiency with which leukocytes may adhere to the local vasculature and extravasate into the local tissue during the development of an inflammatory response. The local concentration of cytokines and growth factor participate in the modulation of the expression of these CAMs.

[1100] Tumor necrosis factor alpha (TNF-a), a potent proinflammatory cytokine, is a stimulator of all three CAMs on endothelial cells and may be involved in a wide variety of inflammatory responses, often resulting in a pathological outcome. The potential of an agonist or antagonist of the invention to mediate a suppression of TNF-a induced CAM expression can be examined. A modified ELISA assay which uses ECs as a solid phase absorbent is employed to measure the amount of CAM expression on TNF-a treated ECs when co-stimulated with a member of the FGF family of proteins.

[1101] To perform the experiment, human umbilical vein endothelial cell (HUvEC) cultures are obtained from pooled cord harvests and maintained in growth medium (EGM-2; Clonetics, San Diego, Calif.) supplemented with 10% FCS and 1% penicillin/streptomycin in a 37 degree C humidified incubator containing 5% CO₂. HUVECs are seeded in 96-well plates at concentrations of 1×10⁴ cells/well in EGM medium at 37 degree C for 18-24 hrs or until confluent. The monolayers are subsequently washed 3 times with a serum-free solution of RPMI-1640 supplemented with 100 U/ml penicillin and 100 mg/ml streptomycin, and treated with a given cytokine and/or growth factos) for 24 h at 37 degree C. Following incubation, the cells are then evaluated for CAM expression.

[1102] Human Umbilical Vein Endothelial cells (HUVECs) are grown in a standard 96 well plate to confluence. Growth medium is removed from the cells and replaced with 90 ul of 199 Medium (10% FBS). Samples for testing and positive or negative controls are added to the plate in triplicate (in 10 ul volumes). Plates are incubated at 37 degree C for either 5 h (selectin and integrin expression) or 24 h (integrin expression only). Plates are aspirated to remove medium and 100 μl of 0.1% paraformaldehyde-PBwith Ca++ and Mg++) is added to each well. Plates are held at 4° C. for 30 min.

[1103] Fixative is then removed from the wells and wells are washed 1× with PB+Ca,Mg)+0.5% BSA and drained. Do not allow the wells to dry. Add 10 μl of diluted primary antibody to the test and control wells. Anti-ICAM-1-Biotin, Anti-VCAM-1-Biotin and Anti-E-selectin-Biotin are used at a concentration of 10 μg/ml (1:10 dilution of 0.1 mg/ml stock antibody). Cells are incubated at 37° C. for 30 min. in a humidified environment. Wells are washed ×3 with PB+Ca,Mg)+0.5% BSA.

[1104] Then add 20 μl of diluted ExtrAvidin-Alkaline Phosphotase (1:5,000 dilution) to each well and incubated at 37° C. for 30 min. Wells are washed ×3 with PB+Ca,Mg)+0.5% BSA. 1 tablet of p-Nitrophenol Phosphate pNPP is dissolved in 5 ml of glycine buffer (pH 10.4). 100 μl of pNPP substrate in glycine buffer is added to each test well. Standard wells in triplicate are prepared from the working dilution of the ExtrAvidin-Alkaline Phosphotase in glycine buffer: 1:5,000 (10⁰)>10^{-0.5}>10⁻¹>10⁻¹1.5 0.5 μl of each dilution is added to triplicate wells and the resulting AP content in each well is 5.50 ng, 1.74 ng, 0.55 ng, 0.18 ng. 100 μl of pNNP reagent must then be added to each of the standard wells. The plate must be incubated at 37° C. for 4h. A volume of 50 μl of 3M NaOH is added to all wells. The results are quantified on a plate reader at 405 nm. The background subtraction option is used on blank wells filled with glycine buffer only. The template is set up to indicate the concentration of AP-conjugate in each standard well [5.50 ng; 1.74 ng; 0.55 ng; 0.18 ng]. Results are indicated as amount of bound AP- conjugate in each sample.

[1105] The studies described in this example tested activity of agonists or antagonists of the invention. However, one skilled in the art could easily modify the exemplified studies to test the activity of polynucleotides or polypeptides of the invention (e.g., gene therapy).

### Example 30

[1106] Production of Polypeptide of the Invention for High-throughput Screening Assays

[1107] The following protocol produces a supernatant containing polypeptide of the present invention to be tested. This supernatant can then be used in the Screening Assays described in Examples 32-41.

[1108] First, dilute Poly-D-Lysine (644 587 Boehringer-Mannheim) stock solution (lmg/ml in PBS) 1:20 in PBS (w/o calcium or magnesium 17-516F Biowhittaker) for a working solution of 50ug/ml. Add 200 ul of this solution to each well (24 well plates) and incubate at RT for 20 minutes. Be sure to distribute the solution over each well (note: a 12-channel pipetter may be used with tips on every other channel). Aspirate off the Poly-D-Lysine solution and rinse with lml PBS (Phosphate Buffered Saline). The PBS should remain in the well until just prior to plating the cells and plates may be poly-lysine coated in advance for up to two weeks.

[1109] Plate 293T cells (do not carry cells past P+20) at 2×10⁵ cells/well in 0.5 ml DMEDulbecco's Modified Eagle Medium)(with 4.5 G/L glucose and L-glutamine (12-604F Biowhittaker))/10% heat inactivated FB14-503F Biowhittaker)/1× Penstre17-602E Biowhittaker). Let the cells grow overnight.

[1110] The next day, mix together in a sterile solution basin: 300 ul Lipofectamine (18324-012 Gibco/BRL) and 5 ml Optimem I (31985070 Gibco/BRL)/96-well plate. With a small volume multi-channel pipetter, aliquot approximately 2 ug of an expression vector containing a polynucleotide insert, produced by the methods described in Examples 8-10, into an appropriately labeled 96-well round bottom plate. With a multi-channel pipetter, add 50 ul of the Lipofectamine/Optimem I mixture to each well. Pipette up and down gently to mix. Incubate at RT 15-45 minutes. After about 20 minutes, use a multi-channel pipetter to add 150 ul Optimem I to each well. As a control, one plate of vector DNA lacking an insert should be transfected with each set of transfections.

[1111] Preferably, the transfection should be performed by tag-teaming the following tasks. By tag-teaming, hands on time is cut in half, and the cells do not spend too much time on PBS. First, person A aspirates off the media from four 24-well plates of cells, and then person B rinses each well with 0.5-1 ml PBS. Person A then aspirates off PBS rinse, and person B, using a12-channel pipetter with tips on every other channel, adds the 200 ul of DNA/Lipofectamine/Optimem I complex to the odd wells first, then to the even wells, to each row on the 24-well plates. Incubate at 37 degree C for 6 hours.

[1112] While cells are incubating, prepare appropriate media, either 1% BSA in DMEM with 1× penstrep, or HGS CHO-5 media (116.6 mg/L of CaCl2 (anhyd); 0.00130 mg/L CuSO₄-5H₂O; 0.050 mg/L of FNO₃)₃-9H₂O; 0.417 mg/L of FeSO₄-7H₂O; 311.80 mg/L of Kcl; 28.64 mg/L of MgCl₂; 48.84 mg/L of MgSO₄; 6995.50 mg/L of NaCl; 2400.0 mg/L of NaHCO₃; 62.50 mg/L of NaH₂PO₄-H₂O; 71.02 mg/L of Na₂HPO₄; 0.4320 mg/L of ZnSO₄-7H₂O; 0.002 mg/L of Arachidonic Acid; 1.022 mg/L of Cholesterol; 0.070 mg/L of DL-alpha-Tocopherol-Acetate; 0.0520 mg/L of Linoleic Acid; 0.010 mg/L of Linolenic Acid; 0.010 mg/L of Myristic Acid; 0.010 mg/L of Oleic Acid; 0.010 mg/L of Palmitric Acid; 0.010 mg/L of Palmitic Acid; 100 mg/L of Pluronic F-68; 0.010 mg/L of Stearic Acid; 2.20 mg/L of Tween 80; 4551 mg/L of D-Glucose; 130.85 mg/ml of L- Alanine; 147.50 mg/ml of L-Arginine-HCL; 7.50 mg/ml of L-Asparagine-H₂O; 6.65 mg/ml of L-Aspartic Acid; 29.56 mg/ml of L-Cystine-2HCL-H₂O; 31.29 mg/ml of L-Cystine-2HCL; 7.35 mg/ml of L-Glutamic Acid; 365.0 mg/ml of L-Glutamine; 18.75 mg/ml of Glycine; 52.48 mg/ml of L-Histidine-HCL-H₂O; 106.97 mg/ml of L-Isoleucine; 111.45 mg/ml of L-Leucine; 163.75 mg/ml of L-Lysine HCL; 32.34 mg/ml of L-Methionine; 68.48 mg/ml of L-Phenylalainine; 40.0 mg/ml of L-Proline; 26.25 mg/ml of L-Serine; 101.05 mg/ml of L-Threonine; 19.22 mg/ml of L-Tryptophan; 91.79 mg/ml of L-Tryrosine-2Na-2H₂O; and 99.65 mg/ml of L-Valine; 0.0035 mg/L of Biotin; 3.24 mg/L of D-Ca Pantothenate; 11.78 mg/L of Choline Chloride; 4.65 mg/L of Folic Acid; 15.60 mg/L of i-Inositol; 3.02 mg/L of Niacinamide; 3.00 mg/L of Pyridoxal HCL; 0.031 mg/L of Pyridoxine HCL; 0.319 mg/L of Riboflavin; 3.17 mg/L of Thiamine HCL; 0.365 mg/L of Thymidine; 0.680 mg/L of Vitamin B₁₂; 25 mM of HEPES Buffer; 2.39 mg/L of Na Hypoxanthine; 0.105 mg/L of Lipoic Acid; 0.081 mg/L of Sodium Putrescine-2HCL; 55.0 mg/L of Sodium Pyruvate; 0.0067 mg/L of Sodium Selenite; 20 uM of Ethanolamine; 0.122 mg/L of Ferric Citrate; 41.70 mg/L of Methyl-B-Cyclodextrin complexed with Linoleic Acid; 33.33 mg/L of Methyl-B-Cyclodextrin complexed with Oleic Acid; 10 mg/L of Methyl-B-Cyclodextrin complexed with Retinal Acetate. Adjust osmolarity to 327 mOsm) with 2 mm glutamine and lx penstrep. (BSA (81-068-3 Bayer) lOOgm dissolved in 1L DMEM for a 10% BSA stock solution). Filter the media and collect 50 ul for endotoxin assay in 15 ml polystyrene conical.

[1113] The transfection reaction is terminated, preferably by tag-teaming, at the end of the incubation period. Person A aspirates off the transfection media, while person B adds 1.5 ml appropriate media to each well. Incubate at 37 degree C for 45 or 72 hours depending on the media used: 1% BSA for 45 hours or CHO-5 for 72 hours.

[1114] On day four, using a 300 ul multichannel pipetter, aliquot 600 ul in one lml deep well plate and the remaining supernatant into a 2 ml deep well. The supernatants from each well can then be used in the assays described in Examples 32-39.

[1115] It is specifically understood that when activity is obtained in any of the assays described below using a supernatant, the activity originates from either the polypeptide of the present invention directly (e.g., as a secreted protein) or by polypeptide of the present invention inducing expression of other proteins, which are then secreted into the supernatant. Thus, the invention further provides a method of identifying the protein in the supernatant characterized by an activity in a particular assay.

### Example 31

[1116] Construction of GAS Reporter Construct

[1117] One signal transduction pathway involved in the differentiation and proliferation of cells is called the Jaks-STATs pathway. Activated proteins in the Jaks- STATs pathway bind to gamma activation site “GAS” elements or interferon-sensitive responsive element (“ISRE”), located in the promoter of many genes. The binding of a protein to these elements alter the expression of the associated gene.

[1118] GAS and ISRE elements are recognized by a class of transcription factors called Signal Transducers and Activators of Transcription, or “STATs.” There are six members of the STATs family. Stat1 and Stat3 are present in many cell types, as is Stat2 (as response to IFN-alpha is widespread). Stat4 is more restricted and is not in many cell types though it has been found in T helper class I, cells after treatment with IL-12. Stat5 was originally called mammary growth factor, but has been found at higher concentrations in other cells including myeloid cells. It can be activated in tissue culture cells by many cytokines.

[1119] The STATs are activated to translocate from the cytoplasm to the nucleus upon tyrosine phosphorylation by a set of kinases known as the Janus Kinase (“Jaks”) family. Jaks represent a distinct family of soluble tyrosine kinases and include Tyk2, Jak1, Jak2, and Jak3. These kinases display significant sequence similarity and are generally catalytically inactive in resting cells.

[1120] The Jaks are activated by a wide range of receptors summarized in the Table below. (Adapted from review by Schidler and Darnell, Ann. Rev. Biochem. 64:621-51 (1995).) A cytokine receptor family, capable of activating Jaks, is divided into two groups: (a) Class 1 includes receptors for IL-2, IL-3, IL-4, IL-6, IL-7, IL-9, IL-11 , IL-12, IL-15, Epo, PRL, GH, G-CSF, GM-CSF, LIF, CNTF, and thrombopoietin; and (b) Class 2 includes IFN-a, IFN-g, and IL-10. The Class 1 receptors share a conserved cysteine motif (a set of four conserved cysteines and one tryptophan) and a WSXWS motif (a membrane proximal region encoding Trp-Ser-Xxx-Trp-Ser (SEQ ID NO:1548)).

[1121] Thus, on binding of a ligand to a receptor, Jaks are activated, which in turn activate STATs, which then translocate and bind to GAS elements. This entire process is encompassed in the Jaks-STATs signal transduction pathway.

[1122] Therefore, activation of the Jaks-STATs pathway, reflected by the binding of the GAS or the ISRE element, can be used to indicate proteins involved in the proliferation and differentiation of cells. For example, growth factors and cytokines are known to activate the Jaks-STATs pathway. (See Table below.) Thus, by using GAS elements linked to reporter molecules, activators of the Jaks-STATs pathway can be identified.

| | JAKs | | | | | |
|---|---|---|---|---|---|---|
| Ligand | tyk2 | Jak1 | Jak2 | Jak3 | STATS | GAS(elements) or ISRE |
| IFN family | | | | | | |
| IFN-a/B | + | + | — | — | 1, 2, 3 | ISRE |
| IFN-g | | + | + | — | 1 | GAS (IRF1 > Lys6 > IFP) |
| Il-10 | + | ? | ? | — | 1, 3 | |
| gp13O family | | | | | | |
| IL-6 (Pleiotrohic) | + | + | + | ? | 1, 3 | GAS (IRF1 > Lys6 > IFP) |
| Il-11(Pleiotrohic) | ? | + | ? | ? | 1, 3 | |
| OnM(Pleiotrohic) | ? | + | + | ? | 1, 3 | |
| LIF(Pleiotrohic) | ? | + | + | ? | 1, 3 | |
| CNTF(Pleiotrohic) | −/+ | + | + | ? | 1, 3 | |
| G-CSF(Pleiotrohic) | ? | + | ? | ? | 1, 3 | |
| IL-12(Pleiotrohic) | + | — | + | + | 1, 3 | |
| g-C family | | | | | | |
| IL-2 (lymphocytes) | — | + | — | + | 1, 3, 5 | GAS |
| IL-4 (lymph/myeloid) | — | + | — | + | 6 | GAS (IRF1 = IFP >> Ly6)(IgH) |
| IL-7 (lymphocytes) | — | + | — | + | 5 | GAS |
| IL-9 (lymphocytes) | — | + | — | + | 5 | GAS |
| IL-13 (lymphocyte) | — | + | ? | ? | 6 | GAS |
| IL-15 | ? | + | ? | + | 5 | GAS |
| gp14O family | | | | | | |
| IL-3 (myeloid) | — | — | + | — | 5 | GAS (IRF1 > IFP >> Ly6) |
| IL-5 (myeloid) | — | — | + | — | 5 | GAS |
| GM-CSF (myeloid) | — | — | + | — | 5 | GAS |
| Growth hormone family | | | | | | |
| GH | ? | — | + | — | 5 | |
| PRL | ? | +/− | + | — | 1, 3, 5 | |
| EPO | ? | — | + | — | 5 | GAS(B-CAS > IRF1 = IFP >> Ly6) |
| Receptor Tyrosine Kinases | | | | | | |
| EGF | ? | + | + | — | 1, 3 | GAS (IRF1) |
| PDGF | ? | + | + | — | 1, 3 | |
| CSF-1 | ? | + | + | — | 1, 3 | GAS (not IRF1) |

[1123] To construct a synthetic GAS containing promoter element, which is used in the Biological Assays described in Examples 32-33, a PCR based strategy is employed to generate a GAS—SV40 promoter sequence. The 5′ primer contains four tandem copies of the GAS binding site found in the IRF1 promoter and previously demonstrated to bind STATs upon induction with a range of cytokines (Rothman et al., Immunity 1:457-468 (1994).), although other GAS or ISRE elements can be used instead. The 5′ primer also contains 18bp of sequence complementary to the SV40 early promoter sequence and is flanked with an XhoI site. The sequence of the 5′ primer is:

| | |
|---|---|
| 5′:GCGCCTCGAGATTTCCCCGAAATCTAGATTTCCCCGAAATGATTCCCCGAA | (SEQ ID NO: 1549). |
| ATGATTTCCCCGAAATATCTGCCATCTCAATTAG:3′ | |

[1124] The downstream primer is complementary to the SV40 promoter and is flanked with a Hind III site:

| | |
|---|---|
| 5′:GCGGCAAGCTTTTTGCAAAGCCTAGGC:3′ | (SEQ ID NO:1550). |

[1125] PCR amplification is performed using the SV40 promoter template present in the B-gal:promoter plasmid obtained from Clontech. The resulting PCR fragment is digested with XhoIHind III and subcloned into BLSK2-. (Stratagene.) Sequencing with forward and reverse primers confirms that the insert contains the following sequence:

| | |
|---|---|
| 5′:CTCGAGATTTCCCCGAAATCTAGATTTCCCCGAAATGATTTCCCCGAAATGA | (SEQ ID NO:1551) |
| TTTCCCCGAAATATCTGCCATCTCAATTAGTCAGCAACCATAGTCCCGCCCCTA | |
| ACTCCGCCCATCCCGCCCCTAACTCCGCCCAGTTCCGCCCATTCTCCGCCCCAT | |
| GGCTGACTAATTTTTTTTATTTATGCAGAGGCCGAGGCCGCCTCGGCCTCTGAG | |
| CTATTCCAGAAGTAGTGAGGAGGCTTTTTTGGAGGCCTAGGCTTTTGCAAAAA | |
| GCTT:3′. | |

[1126] With this GAS promoter element linked to the SV40 promoter, a GAS:SEAP2 reporter construct is next engineered. Here, the reporter molecule is a secreted alkaline phosphatase, or “SEAP.” Clearly, however, any reporter molecule can be instead of SEAP, in this or in any of the other Examples. Well known reporter molecules that can be used instead of SEAP include chloramphenicol acetyltransferase (CAT), luciferase, alkaline phosphatase, B-galactosidase, green fluorescent protein (GFP), or any protein detectable by an antibody.

[1127] The above sequence confirmed synthetic GAS—SV40 promoter element is subcloned into the pSEAP-Promoter vector obtained from Clontech using HindIII and XhoI, effectively replacing the SV40 promoter with the amplified GAS:SV40 promoter element, to create the GAS—SEAP vector. However, this vector does not contain a neomycin resistance gene, and therefore, is not preferred for mammalian expression systems.

[1128] Thus, in order to generate mammalian stable cell lines expressing the GAS- SEAP reporter, the GAS—SEAP cassette is removed from the GAS—SEAP vector using SalI and NotI, and inserted into a backbone vector containing the neomycin resistance gene, such as pGFP-1 (Clontech), using these restriction sites in the multiple cloning site, to create the GAS-SEAP/Neo vector. Once this vector is transfected into mammalian cells, this vector can then be used as a reporter molecule for GAS binding as described in Examples 32-33.

[1129] Other constructs can be made using the above description and replacing GAS with a different promoter sequence. For example, construction of reporter molecules containing NFK-B and EGR promoter sequences are described in Examples 35 and 36. However, many other promoters can be substituted using the protocols described in these Examples. For instance, SRE, IL-2, NFAT, or Osteocalcin promoters can be substituted, alone or in combination (e.g., GAS/NF-KB/EGR, GAS/NF-KB, I1-2/NFAT, or NF-KB/GAS). Similarly, other cell lines can be used to test reporter construct activity, such as HELA (epithelial), HUVEC (endothelial), Reh (B-cell), Saos-2 (osteoblast), HUVAC (aortic), or Cardiomyocyte.

### Example 32

[1130] High-throughput Screening Assay for T-cell Activity.

[1131] The following protocol is used to assess T-cell activity by identifying factors, and determining whether supernate containing a polypeptide of the invention proliferates and/or differentiates T-cells. T-cell activity is assessed using the GAS/SEAP/Neo construct produced in Example 31. Thus, factors that increase SEAP activity indicate the ability to activate the Jaks-STATS signal transduction pathway. The T-cell used in this assay is Jurkat T-cells (ATCC Accession No. TIB-152), although Molt-3 cells (ATCC Accession No. CRL-1552) and Molt-4 cells (ATCC Accession No. CRL-1582) cells can also be used.

[1132] Jurkat T-cells are lymphoblastic CD4+Th1 helper cells. In order to generate stable cell lines, approximately 2 million Jurkat cells are transfected with the GAS-SEAP/neo vector using DMRIE-C (Life Technologies)(transfection procedure described below). The transfected cells are seeded to a density of approximately 20,000 cells per well and transfectants resistant to 1 mg/ml genticin selected. Resistant colonies are expanded and then tested for their response to increasing concentrations of interferon gamma. The dose response of a selected clone is demonstrated.

[1133] Specifically, the following protocol will yield sufficient cells for 75 wells containing 200 ul of cells. Thus, it is either scaled up, or performed in multiple to generate sufficient cells for multiple 96 well plates. Jurkat cells are maintained in RPMI+10% serum with 1% Pen-Strep. Combine 2.5 mls of OPTI-MEM (Life Technologies) with 10 ug of plasmid DNA in a T25 flask. Add 2.5 ml OPTI-MEM containing 50 ul of DMRIE-C and incubate at room temperature for 15-45 mins.

[1134] During the incubation period, count cell concentration, spin down the required number of cells (10⁷ per transfection), and resuspend in OPTI-MEM to a final concentration of 10⁷ cells/ml. Then add 1 ml of 1×10⁷ cells in OPTI-MEM to T25 flask and incubate at 37 degree C for 6 hrs. After the incubation, add 10 ml of RPMI+15% serum.

[1135] The Jurkat:GAS—SEAP stable reporter lines are maintained in RPMI+10% serum, 1 mg/ml Genticin, and 1% Pen-Strep. These cells are treated with supernatants containing polypeptide of the present invention or polypeptide of the present invention induced polypeptides as produced by the protocol described in Example 30.

[1136] On the day of treatment with the supernatant, the cells should be washed and resuspended in fresh RPMI+10% serum to a density of 500,000 cells per ml. The exact number of cells required will depend on the number of supernatants being screened. For one 96 well plate, approximately 10 million cells (for 10 plates, 100 million cells) are required.

[1137] Transfer the cells to a triangular reservoir boat, in order to dispense the cells into a 96 well dish, using a 12 channel pipette. Using a 12 channel pipette, transfer 200 ul of cells into each well (therefore adding 100, 000 cells per well).

[1138] After all the plates have been seeded, 50 ul of the supernatants are transferred directly from the 96 well plate containing the supernatants into each well using a 12 channel pipette. In addition, a dose of exogenous interferon gamma (0.1, 1.0, 10 ng) is added to wells H9, H10, and H11 to serve as additional positive controls for the assay.

[1139] The 96 well dishes containing Jurkat cells treated with supernatants are placed in an incubator for 48 hrs (note: this time is variable between 48-72 hrs). 35 ul samples from each well are then transferred to an opaque 96 well plate using a 12 channel pipette. The opaque plates should be covered (using sellophene covers) and stored at −20 degree C until SEAP assays are performed according to Example 36. The plates containing the remaining treated cells are placed at 4 degree C and serve as a source of material for repeating the assay on a specific well if desired.

[1140] As a positive control, 100 Unit/ml interferon gamma can be used which is known to activate Jurkat T cells. Over 30 fold induction is typically observed in the positive control wells.

[1141] The above protocol may be used in the generation of both transient, as well as, stable transfected cells, which would be apparent to those of skill in the art.

### Example 34

[1142] High-throughput Screening Assay Identifying Myeloid Activity

[1143] The following protocol is used to assess myeloid activity of polypeptide of the present invention by determining whether polypeptide of the present invention proliferates and/or differentiates myeloid cells. Myeloid cell activity is assessed using the GAS/SEAP/Neo construct produced in Example 32. Thus, factors that increase SEAP activity indicate the ability to activate the Jaks-STATS signal transduction pathway. The myeloid cell used in this assay is U937, a pre-monocyte cell line, although TF-1, HL60, or KG1 can be used.

[1144] To transiently transfect U937 cells with the GAS/SEAP/Neo construct produced in Example 32, a DEAE-Dextran method (Kharbanda et. al., 1994, Cell Growth & Differentiation, 5:259-265) is used. First, harvest 2xlOe⁷ U937 cells and wash with PBS. The U937 cells are usually grown in RPMI 1640 medium containing 10% heat- inactivated fetal bovine serum (FBS) supplemented with 100 units/ml penicillin and 100 mg/ml streptomycin.

[1145] Next, suspend the cells in 1 ml of 20 mM Tris-HCl (pH 7.4) buffer containing 0.5 mg/ml DEAE-Dextran, 8 ug GAS—SEAP2 plasmid DNA, 140 mM NaCl, 5 mM KCl, 375 uM Na₂HPO₄.7H₂O, 1 mM MgCl₂, and 675 uM CaCl₂. Incubate at 37 degrees C for 45 min.

[1146] Wash the cells with RPMI 1640 medium containing 10% FBS and then resuspend in 10 ml complete medium and incubate at 37 degree C for 36 hr.

[1147] The GAS-SEAP/U937 stable cells are obtained by growing the cells in 400 ug/ml G418. The G418-free medium is used for routine growth but every one to two months, the cells should be re-grown in 400 ug/ml G418 for couple of passages.

[1148] These cells are tested by harvesting lxlO cells (this is enough for ten 96-well plates assay) and wash with PBS. Suspend the cells in 200 ml above described growth medium, with a final density of 5×10⁵ cells/ml. Plate 200 ul cells per well in the 96-well plate (or 1×10⁵ cells/well).

[1149] Add 50 ul of the supernatant prepared by the protocol described in Example 30. Incubate at 37 degee C for 48 to 72 hr. As a positive control, 100 Unit/ml interferon gamma can be used which is known to activate U937 cells. Over 30 fold induction is typically observed in the positive control wells. SEAP assay the supernatant according to the protocol described in Example 36.

### Example 34

[1150] High-throughput Screening Assay Identifying Neuronal Activity.

[1151] When cells undergo differentiation and proliferation, a group of genes are activated through many different signal transduction pathways. One of these genes, EGR1 (early growth response gene 1), is induced in various tissues and cell types upon activation. The promoter of EGR1 is responsible for such induction. Using the EGR1 promoter linked to reporter molecules, activation of cells can be assessed by polypeptide of the present invention.

[1152] Particularly, the following protocol is used to assess neuronal activity in PC12 cell lines. PC12 cells (rat phenochromocytoma cells) are known to proliferate and/or differentiate by activation with a number of mitogens, such as TPA (tetradecanoyl phorbol acetate), NGF (nerve growth factor), and EGF (epidermal growth factor). The EGR1 gene expression is activated during this treatment. Thus, by stably transfecting PC12 cells with a construct containing an EGR promoter linked to SEAP reporter, activation of PC12 cells by polypeptide of the present invention can be assessed.

[1153] The EGR/SEAP reporter construct can be assembled by the following protocol. The EGR-1 promoter sequence (−633 to +1)(Sakamoto K et al., Oncogene 6:867-871 (1991)) can be PCR amplified from human genomic DNA using the following primers:

| | |
|---|---|
| 5′ GCGCTCGAGGGATGACAGCGATAGAACCCCGG-3′ | (SEQ ID NO:1552) |
| and | |
| 5′ GCGAAGCTTCGCGACTCCCCGGATCCGCCTC-3′ | (SEQ ID NO:1553). |

[1154] Using the GAS:SEAP/Neo vector produced in Example 31, EGR1 amplified product can then be inserted into this vector. Linearize the GAS:SEAP/Neo vector using restriction enzymes XhoI/HindIII, removing the GAS/SV40 stuffer. Restrict the EGR1 amplified product with these same enzymes. Ligate the vector and the EGR1 promoter.

[1155] To prepare 96 well-plates for cell culture, two mls of a coating solution (1:30 dilution of collagen type I (Upstate Biotech Inc. Cat# 08-115) in 30% ethanol (filter sterilized)) is added per one 10 cm plate or 50 ml per well of the 96-well plate, and allowed to air dry for 2 hr.

[1156] PC12 cells are routinely grown in RPMI-1640 medium (Bio Whittaker) containing 10% horse serum (JRH BIOSCIENCES, Cat. #12449-78P), 5% heat-inactivated fetal bovine serum (FBS) supplemented with 100 units/ml penicillin and 100 ug/mil streptomycin on a precoated 10 cm tissue culture dish. One to four split is done every three to four days. Cells are removed from the plates by scraping and resuspended with pipetting up and down for more than 15 times.

[1157] Transfect the EGR/SEAP/Neo construct into PC12 using the Lipofectamine protocol described in Example 31. EGR-SEAP/PC 12 stable cells are obtained by growing the cells in 300 ug/ml G418. The G418-free medium is used for routine growth but every one to two months, the cells should be re-grown in 300 ug/ml G418 for couple of passages.

[1158] To assay for neuronal activity, a 10 cm plate with cells around 70 to 80% confluent is screened by removing the old medium. Wash the cells once with PBS (Phosphate buffered saline). Then starve the cells in low serum medium (RPMI-1640 containing 1% horse serum and 0.5% FBS with antibiotics) overnight.

[1159] The next morning, remove the medium and wash the cells with PBS. Scrape off the cells from the plate, suspend the cells well in 2 ml low serum medium. Count the cell number and add more low serum medium to reach final cell density as 5×10⁵ cells/ml.

[1160] Add 200 ul of the cell suspension to each well of 96-well plate (equivalent to 1×105 cells/well). Add 50 ul supernatant produced by Example 31, 37 degree C for 48 to 72 hr. As a positive control, a growth factor known to activate PC12 cells through EGR can be used, such as 50 ng/ul of Neuronal Growth Factor (NGF). Over fifty-fold induction of SEAP is typically seen in the positive control wells. SEAP assay the supernatant according to Example 37.

### Example 36

[1161] High-throughput Screening Assay for T-cell Activity

[1162] NF-KB (Nuclear Factor KB) is a transcription factor activated by a wide variety of agents including the inflammatory cytokines IL-1 and TNF, CD30 and CD40, lymphotoxin-alpha and lymphotoxin-beta, by exposure to LPS or thrombin, and by expression of certain viral gene products. As a transcription factor, NF-KB regulates the expression of genes involved in immune cell activation, control of apoptosis (NF- KB appears to shield cells from apoptosis), B and T-cell development, anti-viral and antimicrobial responses, and multiple stress responses.

[1163] In non-stimulated conditions, NF- KB is retained in the cytoplasm with I-KB (Inhibitor KB). However, upon stimulation, I- KB is phosphorylated and degraded, causing NF- KB to shuttle to the nucleus, thereby activating transcription of target genes. Target genes activated by NF-KB include IL-2, IL-6, GM-CSF, ICAM-1 and class 1 MHC.

[1164] Due to its central role and ability to respond to a range of stimuli, reporter constructs utilizing the NF-KB promoter element are used to screen the supernatants produced in Example 30. Activators or inhibitors of NF-KB would be useful in treating, preventing, and/or diagnosing diseases. For example, inhibitors of NF-KB could be used to treat those diseases related to the acute or chronic activation of NF-KB, such as rheumatoid arthritis.

[1165] To construct a vector containing the NF-KB promoter element, a PCR based strategy is employed. The upstream primer contains four tandem copies of the NF-KB binding site

(GGGGACTTTCCC) (SEQ ID NO:1554),

[1166] 18 bp of sequence complementary to the 5′ end of the SV40 early promoter sequence, and is flanked with an XhoI site:

| | |
|---|---|
| 5′:GCGGCCTCGAGGGGACTTTCCCGGGGACTTTCCGGGGACTTTCCGGGACTTT | (SEQ ID NO:1555) |
| CCATCCTGCCATCTCAATTAG:3′. | |

[1167] The downstream primer is complementary to the 3′ end of the SV40 promoter and is flanked with a Hind III site:

| | |
|---|---|
| 5′:GCGGCAAGCTTTTTGCAAAGCCTAGGC:3′ | (SEQ ID |
| | NO: 1550). |

[1168] PCR amplification is performed using the SV40 promoter template present in the pB-gal:promoter plasmid obtained from Clontech. The resulting PCR fragment is digested with XhoI and Hind III and subcloned into BLSK2-. (Stratagene) Sequencing with the T7 and T3 primers confirms the insert contains the following sequence:

| | |
|---|---|
| 5′:CTCGAGGGGACTTTCCCGGGGACTTTCCGGGGACTTTCCGGGACTTTCCATC | (SEQ ID NO:1556). |
| TGCCATCTCAATTAGTCAGCAACCATAGTCCCGCCCCTAACTCCGCCCATCCC | |
| GCCCCTAACTCCGCCCAGTTCCGCCCATTCTCCGCCCCATGGCTGACTAATTTT | |
| TTTTATTTATGCAGAGGCCGAGGCCGCCTCGGCCTCTGAGCTATTCCAGAAGT | |
| AGTGAGGAGGCTTTTTTGGAGGCCTAGGCTTTTGCAAAAAGCTT:3′ | |

[1169] Next, replace the SV40 minimal promoter element present in the pSEAP2-promoter plasmid (Clontech) with this NF-KB/SV40 fragment using XhoI and HindIII. However, this vector does not contain a neomycin resistance gene, and therefore, is not preferred for mammalian expression systems.

[1170] In order to generate stable mammalian cell lines, the NF-KB/SV40/SEAP cassette is removed from the above NF-KB/SEAP vector using restriction enzymes SalI and NotI, and inserted into a vector containing neomycin resistance. Particularly, the NF-KB/SV40/SEAP cassette was inserted into pGFP-1 (Clontech), replacing the GFP gene, after restricting pGFP-1 with SalI and NotI.

[1171] Once NF-KB/SV40/SEAP/Neo vector is created, stable Jurkat T-cells are created and maintained according to the protocol described in Example 32. Similarly, the method for assaying supernatants with these stable Jurkat T-cells is also described in Example 32. As a positive control, exogenous TNF alpha (0.1,1, 10 ng) is added to wells H9, H10, and H11, with a 5-10 fold activation typically observed.

### Example 36

[1172] Assay for SEAP Activity

[1173] As a reporter molecule for the assays described in Examples 32-35, SEAP activity is assayed using the Tropix Phospho-light Kit (Cat. BP-400) according to the following general procedure. The Tropix Phospho-light Kit supplies the Dilution, Assay, and Reaction Buffers used below.

[1174] Prime a dispenser with the 2.5× Dilution Buffer and dispense 15 ul of 2.5× dilution buffer into Optiplates containing 35 ul of a supernatant. Seal the plates with a plastic sealer and incubate at 65 degree C for 30 min. Separate the Optiplates to avoid uneven heating.

[1175] Cool the samples to room temperature for 15 minutes. Empty the dispenser and prime with the Assay Buffer. Add 50 ml Assay Buffer and incubate at room temperature 5 min. Empty the dispenser and prime with the Reaction Buffer (see the table below). Add 50 ul Reaction Buffer and incubate at room temperature for 20 minutes. Since the intensity of the chemiluminescent signal is time dependent, and it takes about 10 minutes to read 5 plates on luminometer, one should treat 5 plates at each time and start the second set 10 minutes later.

[1176] Read the relative light unit in the luminometer. Set H12 as blank, and print the results. An increase in chemiluminescence indicates reporter activity. Reaction Buffer Formulation:

| # of plates | Rxn buffer diluent (ml) | CSPD (ml) |
|---|---|---|
| 10 | 60 | 3 |
| 11 | 65 | 3.25 |
| 12 | 70 | 3.5 |
| 13 | 75 | 3.75 |
| 14 | 80 | 4 |
| 15 | 85 | 4.25 |
| 16 | 90 | 4.5 |
| 17 | 95 | 4.75 |
| 18 | 100 | 5 |
| 19 | 105 | 5.25 |
| 20 | 110 | 5.5 |
| 21 | 115 | 5.75 |
| 22 | 120 | 6 |
| 23 | 125 | 6.25 |
| 24 | 130 | 6.5 |
| 25 | 135 | 6.75 |
| 26 | 140 | 7 |
| 27 | 145 | 7.25 |
| 28 | 150 | 7.5 |
| 29 | 155 | 7.75 |
| 30 | 160 | 8 |
| 31 | 165 | 8.25 |
| 32 | 170 | 8.5 |
| 33 | 175 | 8.75 |
| 34 | 180 | 9 |
| 35 | 185 | 9.25 |
| 36 | 190 | 9.5 |
| 37 | 195 | 9.75 |
| 38 | 200 | 10 |
| 39 | 205 | 10.25 |
| 40 | 210 | 10.5 |
| 41 | 215 | 10.75 |
| 42 | 220 | 11 |
| 43 | 225 | 11.25 |
| 44 | 230 | 11.5 |
| 45 | 235 | 11.75 |
| 46 | 240 | 12 |
| 47 | 245 | 12.25 |
| 48 | 250 | 12.5 |
| 49 | 255 | 12.75 |
| 50 | 260 | 13 |

### Example 37

[1177] High-throughput Screening Assay Identifying Changes in Small Molecule Concentration and Membrane Permeability

[1178] Binding of a ligand to a receptor is known to alter intracellular levels of small molecules, such as calcium, potassium, sodium, and pH, as well as alter membrane potential. These alterations can be measured in an assay to identify supernatants which bind to receptors of a particular cell. Although the following protocol describes an assay for calcium, this protocol can easily be modified to detect changes in potassium, sodium, pH, membrane potential, or any other small molecule which is detectable by a fluorescent probe.

[1179] The following assay uses Fluorometric Imaging Plate Reader (“FLIPR”) to measure changes in fluorescent molecules (Molecular Probes) that bind small molecules. Clearly, any fluorescent molecule detecting a small molecule can be used instead of the calcium fluorescent molecule, fluo-4 (Molecular Probes, Inc.; catalog no. F-14202), used here.

[1180] For adherent cells, seed the cells at 10,000-20,000 cells/well in a Co-star black 96-well plate with clear bottom. The plate is incubated in a CO₂ incubator for 20 hours. The adherent cells are washed two times in Biotek washer with 200 ul of HBSS (Hank's Balanced Salt Solution) leaving 100 ul of buffer after the final wash.

[1181] A stock solution of 1 mg/ml fluo-4 is made in 10% pluronic acid DMSO. To load the cells with fluo-4, 50 ul of 12 ug/ml fluo-4 is added to each well. The plate is incubated at 37 degrees C in a CO₂ incubator for 60 min. The plate is washed four times in the Biotek washer with HBSS leaving 100 ul of buffer.

[1182] For non-adherent cells, the cells are spun down from culture media. Cells are re-suspended to 2-5×10⁶ cells/ml with HBSS in a 50-ml conical tube. 4 ul of 1 mg/ml fluo-4 solution in 10% pluronic acid DMSO is added to each ml of cell suspension. The tube is then placed in a 37 degrees C water bath for 30-60 min. The cells are washed twice with HBSS, resuspended to lxlO6 cells/ml, and dispensed into a microplate, 100 ul/well. The plate is centrifuged at 1000 rpm for 5 min. The plate is then washed once in Denley Cell Wash with 200 ul, followed by an aspiration step to 100 ul final volume.

[1183] For a non-cell based assay, each well contains a fluorescent molecule, such as fluo-4. The supernatant is added to the well, and a change in fluorescence is detected.

[1184] To measure the fluorescence of intracellular calcium, the FLIPR is set for the following parameters: (1) System gain is 300-800 mW; (2) Exposure time is 0.4 second; (3) Camera F/stop is F/2; (4) Excitation is 488 nm; (5) Emission is 530 nm; and (6) Sample addition is 50 ul. Increased emission at 530 nm indicates an extracellular signaling event caused by the a molecule, either polypeptide of the present invention or a molecule induced by polypeptide of the present invention, which has resulted in an increase in the intracellular Ca⁺⁺ concentration.

### Example 38

[1185] High-throughput Screening Assay Identifying Tyrosine Kinase Activity

[1186] The Protein Tyrosine Kinases (PTK) represent a diverse group of transmembrane and cytoplasmic kinases. Within the Receptor Protein Tyrosine Kinase RPTK) group are receptors for a range of mitogenic and metabolic growth factors including the PDGF, FGF, EGF, NGF, HGF and Insulin receptor subfamilies. In addition there are a large family of RPTKs for which the corresponding ligand is unknown. Ligands for RPTKs include mainly secreted small proteins, but also membrane-bound and extracellular matrix proteins.

[1187] Activation of RPTK by ligands involves ligand-mediated receptor dimerization, resulting in transphosphorylation of the receptor subunits and activation of the cytoplasmic tyrosine kinases. The cytoplasmic tyrosine kinases include receptor associated tyrosine kinases of the src-family (e.g., src, yes, lck, lyn, fyn) and non-receptor linked and cytosolic protein tyrosine kinases, such as the Jak family, members of which mediate signal transduction triggered by the cytokine superfamily of receptors (e.g., the Interleukins, Interferons, GM-CSF, and Leptin).

[1188] Because of the wide range of known factors capable of stimulating tyrosine kinase activity, identifying whether polypeptide of the present invention or a molecule induced by polypeptide of the present invention is capable of activating tyrosine kinase signal transduction pathways is of interest. Therefore, the following protocol is designed to identify such molecules capable of activating the tyrosine kinase signal transduction pathways.

[1189] Seed target cells (e.g., primary keratinocytes) at a density of approximately 25,000 cells per well in a 96 well Loprodyne Silent Screen Plates purchased from Nalge Nunc (Naperville, Ill.). The plates are sterilized with two 30 minute rinses with 100% ethanol, rinsed with water and dried overnight. Some plates are coated for 2 hr with 100 ml of cell culture grade type I collagen (50 mg/ml), gelatin (2%) or polylysine (50 mg/ml), all of which can be purchased from Sigma Chemicals (St. Louis, Mo.) or 10% Matrigel purchased from Becton Dickinson (Bedford, Mass.), or calf serum, rinsed with PBS and stored at 4 degree C. Cell growth on these plates is assayed by seeding 5,000 cells/well in growth medium and indirect quantitation of cell number through use of alamarBlue as described by the manufacturer Alamar Biosciences, Inc. (Sacramento, Calif.) after 48 hr. Falcon plate covers #3071 from Becton Dickinson (Bedford,MA) are used to cover the Loprodyne Silent Screen Plates. Falcon Microtest III cell culture plates can also be used in some proliferation experiments.

[1190] To prepare extracts, A431 cells are seeded onto the nylon membranes of Loprodyne plates (20,000/200 ml/well) and cultured overnight in complete medium. Cells are quiesced by incubation in serum-free basal medium for 24 hr. After 5-20 minutes treatment with EGF (60 ng/ml) or 50 ul of the supernatant produced in Example 30, the medium was removed and 100 ml of extraction buffer ((20 mM HEPES pH 7.5, 0.15 M NaCl, 1% Triton X-100, 0.1% SDS, 2 mM Na3VO4, 2 mM Na4P207 and a cocktail of protease inhibitors (#1836170) obtained from Boeheringer Mannheim (Indianapolis, Ind.) is added to each well and the plate is shaken on a rotating shaker for 5 minutes at 4° C. The plate is then placed in a vacuum transfer manifold and the extract filtered through the 0.45 mm membrane bottoms of each well using house vacuum. Extracts are collected in a 96-well catch/assay plate in the bottom of the vacuum manifold and immediately placed on ice. To obtain extracts clarified by centrifugation, the content of each well, after detergent solubilization for 5 minutes, is removed and centrifuged for 15 minutes at 4 degree C at 16,000× g.

[1191] Test the filtered extracts for levels of tyrosine kinase activity. Although many methods of detecting tyrosine kinase activity are known, one method is described here.

[1192] Generally, the tyrosine kinase activity of a supernatant is evaluated by determining its ability to phosphorylate a tyrosine residue on a specific substrate (a biotinylated peptide). Biotinylated peptides that can be used for this purpose include PSK1 (corresponding to amino acids 6-20 of the cell division kinase cdc2-p34) and PSK2 (corresponding to amino acids 1-17 of gastrin). Both peptides are substrates for a range of tyrosine kinases and are available from Boehringer Mannheim.

[1193] The tyrosine kinase reaction is set up by adding the following components in order. First, add lOul of 5uM Biotinylated Peptide, then lOul ATP/Mg₂₊ (5 mM ATP/50 mM MgCl₂), then lOul of 5× Assay Buffer (40 mM imidazole hydrochloride, pH7.3, 40 mM beta-glycerophosphate, 1 mM EGTA, 100 mM MgCl₂, 5 mM MnCl₂, 0.5 mg/ml BSA), then 5ul of Sodium VanadatlmM), and then 5ul of water. Mix the components gently and preincubate the reaction mix at 30 degree C for 2 min. Initial the reaction by adding lOul of the control enzyme or the filtered supernatant.

[1194] The tyrosine kinase assay reaction is then terminated by adding 10 ul of 120 mm EDTA and place the reactions on ice.

[1195] Tyrosine kinase activity is determined by transferring 50 ul aliquot of reaction mixture to a microtiter plate (MTP) module and incubating at 37 degree C for 20 min. This allows the streptavadin coated 96 well plate to associate with the biotinylated peptide. Wash the MTP module with 300 ul/well of PBS four times. Next add 75 ul of anti-phospotyrosine antibody conjugated to horse radish peroxidasanti-P-Tyr-POD(0.5 u/ml)) to each well and incubate at 37 degree C for one hour. Wash the well as above.

[1196] Next add 100 ul of peroxidase substrate solution (Boehringer Mannheim) and incubate at room temperature for at least 5 mins (up to 30 min). Measure the absorbance of the sample at 405 nm by using ELISA reader. The level of bound peroxidase activity is quantitated using an ELISA reader and reflects the level of tyrosine kinase activity.

### Example 39

[1197] High-throughput Screening Assay Identifying Phosphorylation Activity

[1198] As a potential alternative and/or compliment to the assay of protein tyrosine kinase activity described in Example 38, an assay which detects activation (phosphorylation) of major intracellular signal transduction intermediates can also be used. For example, as described below one particular assay can detect tyrosine phosphorylation of the Erk-1 and Erk-2 kinases. However, phosphorylation of other molecules, such as Raf, JNK, p38 MAP, Map kinase kinase (MEK), MEK kinase, Src, Muscle specific kinase (MuSK), IRAK, Tec, and Janus, as well as any other phosphoserine, phosphotyrosine, or phosphothreonine molecule, can be detected by substituting these molecules for Erk-1 or Erk-2 in the following assay.

[1199] Specifically, assay plates are made by coating the wells of a 96-well ELISA plate with O.lml of protein G (lug/ml) for 2 hr at room temp, (RT). The plates are then rinsed with PBS and blocked with 3% BSA/PBS for 1 hr at RT. The protein G plates are then treated with 2 commercial monoclonal antibodies (100 ng/well) against Erk-1 and Erk-2 (1 hr at RT) (Santa Cruz Biotechnology). (To detect other molecules, this step can easily be modified by substituting a monoclonal antibody detecting any of the above described molecules.) After 3-5 rinses with PBS, the plates are stored at 4 degree C until use.

[1200] A431 cells are seeded at 20,000/well in a 96-well Loprodyne filterplate and cultured overnight in growth medium. The cells are then starved for 48 hr in basal medium (DMEM) and then treated with EGF (6 ng/well) or 50 ul of the supernatants obtained in Example 30 for 5-20 minutes. The cells are then solubilized and extracts filtered directly into the assay plate.

[1201] After incubation with the extract for 1 hr at RT, the wells are again rinsed. As a positive control, a commercial preparation of MAP kinase (lOng/well) is used in place of A431 extract. Plates are then treated with a commercial polyclonal (rabbit) antibody (1 ug/ml) which specifically recognizes the phosphorylated epitope of the Erk-1 and Erk-2 kinases (1 hr at RT). This antibody is biotinylated by standard procedures. The bound polyclonal antibody is then quantitated by successive incubations with Europium-streptavidin and Europium fluorescence enhancing reagent in the Wallac DELFIA instrument (time-resolved fluorescence). An increased fluorescent signal over background indicates a phosphorylation by polypeptide of the present invention or a molecule induced by polypeptide of the present invention.

### Example 40

[1202] Assay for the Stimulation of Bone Marrow CD34+ Cell Proliferation

[1203] This assay is based on the ability of human CD34+ to proliferate in the presence of hematopoietic growth factors and evaluates the ability of isolated polypeptides expressed in mammalian cells to stimulate proliferation of CD34+ cells.

[1204] It has been previously shown that most mature precursors will respond to only a single signal. More immature precursors require at least two signals to respond. Therefore, to test the effect of polypeptides on hematopoietic activity of a wide range of progenitor cells, the assay contains a given polypeptide in the presence or absence of other hematopoietic growth factors. Isolated cells are cultured for 5 days in the presence of Stem Cell Factor (SCF) in combination with tested sample. SCF alone has a very limited effect on the proliferation of bone marrow (BM) cells, acting in such conditions only as a “survival” factor. However, combined with any factor exhibiting stimulatory effect on these cells (e.g., IL-3), SCF will cause a synergistic effect. Therefore, if the tested polypeptide has a stimulatory effect on a hematopoietic progenitors, such activity can be easily detected. Since normal BM cells have a low level of cycling cells, it is likely that any inhibitory effect of a given polypeptide, or agonists or antagonists thereof, might not be detected. Accordingly, assays for an inhibitory effect on progenitors is preferably tested in cells that are first subjected to in vitro stimulation with SCF+IL+3, and then contacted with the compound that is being evaluated for inhibition of such induced proliferation.

[1205] Briefly, CD34+ cells are isolated using methods known in the art. The cells are thawed and resuspended in medium (QBSF 60 serum-free medium with 1% L- glutamine (SOOml) Quality Biological, Inc., Gaithersburg, MD Cat# 160-204-101). After several gentle centrifugation steps at 200× g, cells are allowed to rest for one hour. The cell count is adjusted to 2.5×10⁵ cells/ml. During this time, 100 μl of sterile water is added to the peripheral wells of a 96-well plate. The cytokines that can be tested with a given polypeptide in this assay is rhSCF (R&D Systems, Minneapolis, Minn., Cat# 255-SC) at 50 ng/ml alone and in combination with rhSCF and rhIL-3 (R&D Systems, Minneapolis, Minn., Cat# 203-ML) at 30 ng/ml. After one hour, 10 μl of prepared cytokines, 50 μl of the supernatants prepared in Example 30 (supernatants at 1:2 dilution =50 μl) and 20 μl of diluted cells are added to the media which is already present in the wells to allow for a final total volume of 100 μl. The plates are then placed in a 37° C./5% CO₂ incubator for five days.

[1206] Eighteen hours before the assay is harvested, 0.5 μCi/well of [3H] Thymidine is added in a 10 μl volume to each well to determine the proliferation rate. The experiment is terminated by harvesting the cells from each 96-well plate to a filtermat using the Tomtec Harvester 96. After harvesting, the filtermats are dried, trimmed and placed into OmniFilter assemblies consisting of one OmniFilter plate and one OmniFilter Tray. 60 μl Microscint is added to each well and the plate sealed with TopSeal-A press-on sealing film A bar code 15 sticker is affixed to the first plate for counting. The sealed plates is then loaded and the level of radioactivity determined via the Packard Top Count and the printed data collected for analysis. The level of radioactivity reflects the amount of cell proliferation.

[1207] The studies described in this example test the activity of a given polypeptide to stimulate bone marrow CD34+ cell proliferation. One skilled in the art could easily modify the exemplified studies to test the activity of polynucleotides (e.g., gene therapy), antibodies, agonists, and/or antagonists and fragments and variants thereof. As a nonlimiting example, potential antagonists tested in this assay would be expected to inhibit cell proliferation in the presence of cytokines and/or to increase the inhibition of cell proliferation in the presence of cytokines and a given polypeptide. In contrast, potential agonists tested in this assay would be expected to enhance cell proliferation and/or to decrease the inhibition of cell proliferation in the presence of cytokines and a given polypeptide.

[1208] The ability of a gene to stimulate the proliferation of bone marrow CD34+ cells indicates that polynucleotides and polypeptides corresponding to the gene are useful for the diagnosis and treatment of disorders affecting the immune system and hematopoiesis. Representative uses are described in the “Immune Activity” and “Infectious Disease” sections above, and elsewhere herein.

### Example 41

[1209] Assay for Extracellular Matrix Enhanced Cell Response (EMECR)

[1210] The objective of the Extracellular Matrix Enhanced Cell Response (EMECR) assay is to identify gene products (e.g., isolated polypeptides) that act on the hematopoietic stem cells in the context of the extracellular matrix (ECM) induced signal.

[1211] Cells respond to the regulatory factors in the context of signas) received from the surrounding microenvironment. For example, fibroblasts, and endothelial and epithelial stem cells fail to replicate in the absence of signals from the ECM. Hematopoietic stem cells can undergo self-renewal in the bone marrow, but not in in vitro suspension culture. The ability of stem cells to undergo self-renewal in vitro is dependent upon their interaction with the stromal cells and the ECM protein fibronectin (fn). Adhesion of cells to fn is mediated by the α_{5·}β₁ and α_{4·}β₁ integrin receptors, which are expressed by human and mouse hematopoietic stem cells. The factos) which integrate with the ECM environment and responsible for stimulating stem cell self-renewal has not yet been identified. Discovery of such factors should be of great interest in gene therapy and bone marrow transplant applications

[1212] Briefly, polystyrene, non tissue culture treated, 96-well plates are coated with fn fragment at a coating concentration of 0.2 μg/cm². Mouse bone marrow cells are plated (1,000 cells/well ) in 0.2 ml of serum-free medium. Cells cultured in the presence of IL-3 (5 ng/ml )+SCF (50 ng/ml ) would serve as the positive control, conditions under which little self-renewal but pronounced differentiation of the stem cells is to be expected. Gene products of the invention (e.g., including, but not limited to, polynucleotides and polypeptides of the present invention, and supernatants produced in Example 30), are tested with appropriate negative controls in the presence and absence of SCF (5.0 ng/ml), where test factor supemates represent 10% of the total assay volume. The plated cells are then allowed to grow by incubating in a low oxygen environment (5% CO₂, 7% O₂, and 88% N₂) tissue culture incubator for 7 days. The number of proliferating cells within the wells is then quantitated by measuring thymidine incorporation into cellular DNA. Verification of the positive hits in the assay will require phenotypic characterization of the cells, which can be accomplished by scaling up of the culture system and using appropriate antibody reagents against cell surface antigens and FACScan.

[1213] One skilled in the art could easily modify the exemplified studies to test the activity of polynucleotides (e.g., gene therapy), antibodies, agonists, and/or antagonists and fragments and variants thereof.

[1214] If a particular polypeptide of the present invention is found to be a stimulator of hematopoietic progenitors, polynucleotides and polypeptides corresponding to the gene encoding said polypeptide may be useful for the diagnosis and treatment of disorders affecting the immune system and hematopoiesis. Representative uses are described in the “Immune Activity” and “Infectious Disease” sections above, and elsewhere herein. The gene product may also be useful in the expansion of stem cells and committed progenitors of various blood lineages, and in the differentiation and/or proliferation of various cell types.

[1215] Additionally, the polynucleotides and/or polypeptides of the gene of interest and/or agonists and/or antagonists thereof, may also be employed to inhibit the proliferation and differentiation of hematopoietic cells and therefore may be employed to protect bone marrow stem cells from chemotherapeutic agents during chemotherapy. This antiproliferative effect may allow administration of higher doses of chemotherapeutic agents and, therefore, more effective chemotherapeutic treatment.

[1216] Moreover, polynucleotides and polypeptides corresponding to the gene of interest may also be useful for the treatment and diagnosis of hematopoietic related disorders such as, for example, anemia, pancytopenia, leukopenia, thrombocytopenia or leukemia since stromal cells are important in the production of cells of hematopoietic lineages. The uses include bone marrow cell ex-vivo culture, bone marrow transplantation, bone marrow reconstitution, radiotherapy or chemotherapy of neoplasia.

### Example 42

[1217] Human Dermal Fibroblast and Aortic Smooth Muscle Cell Proliferation

[1218] The polypeptide of interest is added to cultures of normal human dermal fibroblasts (NHDF) and human aortic smooth muscle cells (AoSMC) and two co-assays are performed with each sample. The first assay examines the effect of the polypeptide of interest on the proliferation of normal human dermal fibroblasts (NHDF) or aortic smooth muscle cells (AoSMC). Aberrant growth of fibroblasts or smooth muscle cells is a part of several pathological processes, including fibrosis, and restenosis. The second assay examines IL6 production by both NHDF and SMC. IL6 production is an indication of functional activation. Activated cells will have increased production of a number of cytokines and other factors, which can result in a proinflammatory or immunomodulatory outcome. Assays are run with and without co-TNFa stimulation, in order to check for costimulatory or inhibitory activity.

[1219] Briefly, on day 1, 96-well black plates are set up with 1000 cells/well (NHDF) or 2000 cells/well (AoSMC) in 100 μl culture media. NHDF culture media contains: Clonetics FB basal media, 1mg/ml hFGF, 5 mg/ml insulin, 50 mg/ml gentamycin, 2% FBS, while AoSMC culture media contains Clonetics SM basal media, 0.5 μg/ml hEGF, 5 mg/ml insulin, 1 μg/ml hFGF, 50 mg/ml gentamycin, 50 μg/ml Amphotericin B, 5% FBS. After incubation at 37° C. for at least 4-5 hours, culture media is aspirated and replaced with growth arrest media. Growth arrest media for NHDF contains fibroblast basal media, 50 mg/ml gentamycin, 2% FBS, while growth arrest media for AoSMC contains SM basal media, 50 mg/ml gentamycin, 50 μg/ml Amphotericin B, 0.4% FBS. Incubate at 37° C. until day 2.

[1220] On day 2, serial dilutions and templates of the polypeptide of interest are designed such that they always include media controls and known-protein controls. For both stimulation and inhibition experiments, proteins are diluted in growth arrest media. For inhibition experiments, TNFa is added to a final concentration of 2 ng/ml (NHDF) or 5 ng/ml (AoSMC). Add 1/3 vol media containing controls or polypeptides of the present invention and incubate at 37° C./5% CO₂ until day 5.

[1221] Transfer 60 μl from each well to another labeled 96-well plate, cover with a plate-sealer, and store at 4° C. until Day 6 (for IL6 ELISA). To the remaining 100 μl in the cell culture plate, aseptically add Alamar Blue in an amount equal to 10% of the culture volume (10μl ). Return plates to incubator for 3 to 4 hours. Then measure fluorescence with excitation at 530 nm and emission at 590 nm using the CytoFluor. This yields the growth stimulation/inhibition data.

[1222] On day 5, the IL6 ELISA is performed by coating a 96 well plate with 50-100 ul/well of Anti-Human IL6 Monoclonal antibody diluted in PBS, pH 7.4, incubate ON at room temperature.

[1223] On day 6, empty the plates into the sink and blot on paper towels. Prepare Assay Buffer containing PBS with 4% BSA. Block the plates with 200 μl/well of Pierce Super Block blocking buffer in PBS for 1-2 hr and then wash plates with wash buffer (PBS, 0.05% Tween-20). Blot plates on paper towels. Then add 50 μl/well of diluted Anti-Human IL-6 Monoclonal, Biotin-labeled antibody at 0.50 mg/ml. Make dilutions of IL-6 stock in media (30, 10, 3, 1, 0.3, 0 ng/ml). Add duplicate samples to top row of plate. Cover the plates and incubate for 2 hours at RT on shaker. Plates are washed with wash buffer and blotted on paper towels. Dilute EU-labeled Streptavidin 1:1000 in Assay buffer, and add 100 μl/well. Cover the plate and incubate 1 h at RT. Plates are again washed with wash buffer and blotted on paper towels. Add 100 μl/well of Enhancement Solution and shake for 5 minutes. Read the plate on the Wallac DELFIA Fluorometer. Readings from triplicate samples in each assay are tabulated and averaged.

[1224] A positive result in this assay suggests AoSMC cell proliferation and that the polypeptide of the present invention may be involved in dermal fibroblast proliferation and/or smooth muscle cell proliferation. A positive result also suggests many potential uses of polypeptides, polynucleotides, agonists and/or antagonists of the polynucleotide/polypeptide of the present invention which gives a positive result. For example, inflammation and immune responses, wound healing, and angiogenesis, as detailed throughout this specification. Particularly, polypeptides of the present invention and polynucleotides of the present invention may be used in wound healing and dermal regeneration, as well as the promotion of vasculargenesis, both of the blood vessels and lymphatics. The growth of vessels can be used in the treatment of, for example, cardiovascular diseases. Additionally, antagonists of polypeptides and polynucleotides of the invention may be useful in treating diseases, disorders, and/or conditions which involve angiogenesis by acting as an anti-vascular (e.g., anti-angiogenesis). These diseases, disorders, and/or conditions are known in the art and/or are described herein, such as, for example, malignancies, solid tumors, benign tumors, for example hemangiomas, acoustic neuromas, neurofibromas, trachomas, and pyogenic granulomas; artheroscleric plaques; ocular angiogenic diseases, for example, diabetic retinopathy, retinopathy of prematurity, macular degeneration, corneal graft rejection, neovascular glaucoma, retrolental fibroplasia, rubeosis, retinoblastoma, uvietis and Pterygia (abnormal blood vessel growth) of the eye; rheumatoid arthritis; psoriasis; delayed wound healing; endometriosis; vasculogenesis; granulations; hypertrophic scars (keloids); nonunion fractures; scleroderma; trachoma; vascular adhesions; myocardial angiogenesis; coronary collaterals; cerebral collaterals; arteriovenous malformations; ischemic limb angiogenesis; Osler-Webber Syndrome; plaque neovascularization; telangiectasia; hemophiliac joints; angiofibroma; fibromuscular dysplasia; wound granulation; Crohn's disease; and atherosclerosis. Moreover, antagonists of polypeptides and polynucleotides of the invention may be useful in treating anti-hyperproliferative diseases and/or anti-inflammatory known in the art and/or described herein.

[1225] One skilled in the art could easily modify the exemplified studies to test the activity of polynucleotides (e.g., gene therapy), antibodies, agonists, and/or antagonists and fragments and variants thereof.

### Example 43

[1226] Cellular Adhesion Molecule (CAM) Expression on Endothelial Cells

[1227] The recruitment of lymphocytes to areas of inflammation and angiogenesis involves specific receptor-ligand interactions between cell surface adhesion molecules (CAMs) on lymphocytes and the vascular endothelium. The adhesion process, in both normal and pathological settings, follows a multi-step cascade that involves intercellular adhesion molecule-1 (ICAM-1), vascular cell adhesion molecule-1 (VCAM-1), and endothelial leukocyte adhesion molecule-1 (E-selectin) expression on endothelial cells (EC). The expression of these molecules and others on the vascular endothelium determines the efficiency with which leukocytes may adhere to the local vasculature and extravasate into the local tissue during the development of an inflammatory response. The local concentration of cytokines and growth factor participate in the modulation of the expression of these CAMs.

[1228] Briefly, endothelial cells (e.g., Human Umbilical Vein Endothelial cells (HUVECs)) are grown in a standard 96 well plate to confluence, growth medium is removed from the cells and replaced with 100 μl of 199 Medium (10% fetal bovine serum (FBS)). Samples for testing and positive or negative controls are added to the plate in triplicate (in 10 μl volumes). Plates are then incubated at 37° C. for either 5 h (selectin and integrin expression) or 24 h (integrin expression only). Plates are aspirated to remove medium and 100 μl of 0.1% paraformaldehyde-PBwith Ca++ and Mg++) is added to each well. Plates are held at 4° C. for 30 min. Fixative is removed from the wells and wells are washed IX with PB+Ca,Mg)+0.5% BSA and drained. 10 μl of diluted primary antibody is added to the test and control wells. Anti-ICAM-1-Biotin, Anti-VCAM-1-Biotin and Anti-E-selectin-Biotin are used at a concentration of 10 μg/ml (1:10 dilution of 0.1 mg/ml stock antibody). Cells are incubated at 37° C. for 30 min. in a humidified environment. Wells are washed three times with PB+Ca,Mg)+0.5% BSA. 20 μl of diluted ExtrAvidin-Alkaline Phosphotase (1:5,000 dilution, refered to herein as the working dilution) are added to each well and incubated at 37° C. for 30 min. Wells are washed three times with PB+Ca,Mg)+0.5% BSA. Dissolve 1 tablet of p-Nitrophenol Phosphate pNPP per 5 ml of glycine buffer (pH 10.4). 100 μl of pNPP substrate in glycine buffer is added to each test well. Standard wells in triplicate are prepared from the working dilution of the ExtrAvidin-Alkaline Phosphotase in glycine buffer: 1:5,000 (10⁰) >10^{-0.05}>10⁻¹>10^{1.5}0.5 μl of each dilution is added to triplicate wells and the resulting AP content in each well is 5.50 ng, 1.74 ng, 0.55 ng, 0.18 ng. 100 μl of pNNP reagent is then added to each of the standard wells. The plate is incubated at 37° C. for 4 h. A volume of 50 μl of 3M NaOH is added to all wells. The plate is read on a plate reader at 405 nm using the background subtraction option on blank wells filled with glycine buffer only. Additionally, the template is set up to indicate the concentration of AP-conjugate in each standard well [5.50 ng; 1.74 ng; 0.55 ng; 0.18 ng]. Results are indicated as amount of bound AP-conjugate in each sample.

### Example 44

[1229] Alamar Blue Endothelial Cells Proliferation Assay

[1230] This assay may be used to quantitatively determine protein mediated inhibition of bFGF-induced proliferation of Bovine Lymphatic Endothelial Cells (LECs), Bovine Aortic Endothelial Cells (BAECs) or Human Microvascular Uterine Myometrial Cells (UTMECs). This assay incorporates a fluorometric growth indicator based on detection of metabolic activity. A standard Alamar Blue Proliferation Assay is prepared in EGM-2MV with 10 ng /ml of bFGF added as a source of endothelial cell stimulation. This assay may be used with a variety of endothelial cells with slight changes in growth medium and cell concentration. Dilutions of the protein batches to be tested are diluted as appropriate. Serum-free medium (GIBCO SFM) without bFGF is used as a non- stimulated control and Angiostatin or TSP-1 are included as a known inhibitory controls.

[1231] Briefly, LEC, BAECs or UTMECs are seeded in growth media at a density of 5000 to 2000 cells/well in a 96 well plate and placed at 37-C overnight. After the overnight incubation of the cells, the growth media is removed and replaced with GIBCO EC-SFM. The cells are treated with the appropriate dilutions of the protein of interest or control protein sampls) (prepared in SFM ) in triplicate wells with additional bFGF to a concentration of 10 ng/ml. Once the cells have been treated with the samples, the plats) is/are placed back in the 37° C. incubator for three days. After three days 10 ml of stock alamar blue (Biosource Cat# DAL1100) is added to each well and the plats) is/are placed back in the 37° C. incubator for four hours. The plats) are then read at 530 nm excitation and 590 nm emission using the CytoFluor fluorescence reader. Direct output is recorded in relative fluorescence units.

[1232] Alamar blue is an oxidation-reduction indicator that both fluoresces and changes color in response to chemical reduction of growth medium resulting from cell growth. As cells grow in culture, innate metabolic activity results in a chemical reduction of the immediate surrounding environment. Reduction related to growth causes the indicator to change from oxidized (non-fluorescent blue) form to reduced (fluorescent red) form. i.e. stimulated proliferation will produce a stronger signal and inhibited proliferation will produce a weaker signal and the total signal is proportional to the total number of cells as well as their metabolic activity. The background level of activity is observed with the starvation medium alone. This is compared to the output observed from the positive control samples (bFGF in growth medium) and protein dilutions.

### Example 45

[1233] Detection of Inhibition of a Mixed Lymphocyte Reaction

[1234] This assay can be used to detect and evaluate inhibition of a Mixed Lymphocyte Reaction (MLR) by gene products (e.g., isolated polypeptides). Inhibition of a MLR may be due to a direct effect on cell proliferation and viability, modulation of costimulatory molecules on interacting cells, modulation of adhesiveness between lymphocytes and accessory cells, or modulation of cytokine production by accessory cells. Multiple cells may be targeted by these polypeptides since the peripheral blood mononuclear fraction used in this assay includes T, B and natural killer lymphocytes, as well as monocytes and dendritic cells.

[1235] Polypeptides of interest found to inhibit the MLR may find application in diseases associated with lymphocyte and monocyte activation or proliferation. These include, but are not limited to, diseases such as asthma, arthritis, diabetes, inflammatory skin conditions, psoriasis, eczema, systemic lupus erythematosus, multiple sclerosis, glomerulonephritis, inflammatory bowel disease, crohn's disease, ulcerative colitis, arteriosclerosis, cirrhosis, graft vs. host disease, host vs. graft disease, hepatitis, leukemia and lymphoma.

[1236] Briefly, PBMCs from human donors are purified by density gradient centrifugation using Lymphocyte Separation Medium (LSM®, density 1.0770 g/ml, Organon Teknika Corporation, West Chester, Pa.). PBMCs from two donors are adjusted to 2×10⁶ cells/ml in RPMI-1640 (Life Technologies, Grand Island, N.Y.) supplemented with 10% FCS and 2 mM glutamine. PBMCs from a third donor is adjusted to 2×10⁵ cells/ml. Fifty microliters of PBMCs from each donor is added to wells of a 96-well round bottom microtiter plate. Dilutions of test materials (50 μl) is added in triplicate to microtiter wells. Test samples (of the protein of interest) are added for final dilution of 1:4; rhuIL-2 (R&D Systems, Minneapolis, Minn., catalog number 202-IL) is added to a final concentration of 1 μg/ml; anti-CD4 mAb (R&D Systems, clone 34930.11, catalog number MAB379) is added to a final concentration of 10 μg/ml. Cells are cultured for 7-8 days at 37° C. in 5% CO₂, and 1 μC of [³H] thymidine is added to wells for the last 16 hrs of culture. Cells are harvested and thymidine incorporation determined using a Packard TopCount. Data is expressed as the mean and standard deviation of triplicate determinations.

[1237] Samples of the protein of interest are screened in separate experiments and compared to the negative control treatment, anti-CD4 mAb, which inhibits proliferation of lymphocytes and the positive control treatment, IL-2 (either as recombinant material or supernatant), which enhances proliferation of lymphocytes.

[1238] One skilled in the art could easily modify the exemplified studies to test the activity of polynucleotides (e.g., gene therapy), antibodies, agonists, and/or antagonists and fragments and variants thereof.

[1239] It will be clear that the invention may be practiced otherwise than as particularly described in the foregoing description and examples. Numerous modifications and variations of the present invention are possible in light of the above teachings and, therefore, are within the scope of the appended claims.

[1240] The entire disclosure of each document cited (including patents, patent applications, journal articles, abstracts, laboratory manuals, books, or other disclosures) in the Background of the Invention, Detailed Description, and Examples is hereby incorporated herein by reference. Further, the paper copy on CD-ROM of the sequence listing submitted herewith and the corresponding computer readable form on CD-ROM are both incorporated herein by reference in their entireties. Moreover, the hard copy of and the corresponding computer readable form of the Sequence Listing of Ser. No. 60/124,270 and International Application No. PCT/US_{00/05918} are also incorporated herein by reference in their entireties.

The application's sequence listing, which the Patent Office published only in electronic form, follows.

SEQUENCE LISTING (896 sequences)

SEQ ID NO: 1 - DNA, 1580 bp, Homo sapiens
  misc feature (1566): n equals a,t,g, or c
  misc feature (1576): n equals a,t,g, or c
gcggaagaagatggcgctcaccagctttttacctgcacctactcagctatctcaggaccagcttgaggctgaagaaaaggcaagatcccagagatcacggcagacctcactggtctcctcccgaagagaacctcccccgtacggataccggaaaggctggatacctcggttattagaggattttggagatggaggtgcttttccagagatccatgtggcccagtatccactggatatgggacgaaagaaaaaaatgtcgaatgcgctggccattcaggtggattctgaaggaaaaattaaatatgatgcaattgctcgacaaggacagtcaaaagacaaggtcatttatagcaaatacactgacctggttccaaaggaggttatgaatgcagatgatccagacctgcaaaggcccgatgaagaagctattaaagagataacagaaaagacaagagtagccttagaaaaatctgtatcacagaaggtcgccgcagccatgccagttcgagcagctgacaaattggctcctgctcagtatatccgatacacaccatctcagcaaggagtggcattcaactctggagctaaacagagggttattcggatggtagaaatgcagaaagatccaatggagcctccaaggttcaagattaataagaaaattccccggggaccaccttctcctcctgcgcctgtcatgcattctcctagccgaaagatgactgtaaaggaacaacaagagtggaagattcctccttgtatttctaactggaaaaatgcaaagggttatacaattccattagacaaacgtctggctgctgatggaagaggactacagacagtacacataaatgaaaatttcgccaaattggcagaagccctctacattgctgatcggaaggctcgtgaagctgtgggaaatgcgtgcccaagtagagagaaaaatggctcagaaagaaaaggaaaaacatgaagagaaacttagagaaatggcccagaaagccagggaragaagagctgggatcaaaactcatgtggaaaaagaggatggggaggcacgtgagagggatgaaatccggcatgacaggcgaaaagagagacagcatgaccggaatctttccagggcagctcctgataagaggtcgaaacttcagagaaatgaaaatcgggatatcagtgaagttattgctctcggtgttcctaatcctcggacttccaatgaagttcagtatgaccaaaggctcttcaaccaatccaagggtatggacagtggatttgcaggtggagaagatgaaatttataatgtttatgatcaagcctggagaggtggtaaagatatggcccagagtatttataggcccagtaaaaatctggacaaggacatgtatggtgatgacctagaagccagaataaagaccaacaggtgccaagccatacaactcaatttcagtgtttacackggtgaaagcaaagtagttcatagttttttctccttttccttagatttgttcccgacaaggagttttctgggttcagaccgtagacagagaggccgagaaggaccanttcatttgangaag

SEQ ID NO: 2 - DNA, 2442 bp, Homo sapiens
tgggtccgacccacgcgtccgacgctgacaagtatctgtgaaaaggttattgtgcctaacatggaatttagagctgctgatgaagaagcatttgaagataattctgaggagtacataaggagagatttggaaggatctgatattgatactagacgcagggctgcttgtgatctggtacgaggattatgcaagttttttgagggacctgtgacaggaatcttctctggttatgttaattccatgctgcaggaatacgcaaaaaatccatctgtcaactggaaacacaaagatgcagccatctacctagtgacatctttggcatcaaaagcccaaacacagaagcatggaattacacaagcaaatgaacttgtaaacctaactgagttctttgtgaatcacatcctccctgatttaaaatcagctaatgtgaatgaatttcctgtccttaaagctgacggtatcaaatatattatgatttttagaaatcaagtgccaaaagaacatcttttagtctcgattcctctcttgattaatcatcttcaagctgaaagtattgttgttcatacttacgcagctcatgctcttgaacggctctttactatgcgagggcctaacaatgccactctctttacagctgcagaaatcgcaccgtttgttgagattctgctaacaaaccttttcaaagctctcacacttcctggctcttcagaaaatgaatatattatgaaagctatcatgagaagtttttctctcctacaagaagccataatcccctacatccctactctcatcactcagcttacacagaagctattagctgttagtaagaacccaagcaaacctcactttaatcactacatgtttgaagcaatatgtttatccataagaataacttgcaaagctaaccctgctgctgttgtaaattttgaggaggctttgtttttggtgtttactgaaatcttacaaaatgatgtgcaagaatttattccatacgtctttcaagtgatgtctttgcttctggaaacacacaaaaatgacatcccgtcttcctatatggccttatttcctcatctccttcagccagtgctttgggaaagaacaggaaatattcctgctctagtgaggcttcttcaagcattcttagaacgcggttcaaacacaatagcaagtgctgcagctgacaaaattcctgggttactaggtgtctttcagaagctgattgcatccaaagcaaatgaccaccaaggtttttatcttctaaacagtataatagagcacatgcctcctgaatcagttgaccaatataggaaacaaatcttcattctgctattccagagacttcagaattccaaaacaaccaagtttatcaagagttttttagtctttattaatttgtattgcataaaatatggggcactagcactacaagaaatatttgatggtatacaaccaaaaatgtttggaatggttttggaaaaaattattattcctgaaattcagaaggtatctggaaatgtagagaaaaagatctgtgcggttggcataaccaaattactaacagaatgtcccccaatgatggacactgagtataccaaactgtggactccattattacagtctttgattggtctttttgagttacccgaagatgataccattcctgatgaggaacattttattgacatagaagatacaccaggatatcagactgccttctcacagttggcatttgctgggaaaaaagagcatgatcctgtaggtcaaatggtgaataaccccaaaattcacctggcacagtcacttcacaagttgtctaccgcctgtccaggaagggttccatcaatggtgagcaccagcctgaatgcagaagcgctccagtatctccaagggtaccttcaggcagccagtgtgacactgctttaaactgcatttttctaatgggctaaacccagatggtttcctaggaaatcacaggcttctgagcacagctgcattaaaacaaaggaagttytccttttgaacttgtcacgaattccatcttgtaaaggatattaaatgttgctttaacctgaaccttgagcaaattagttggtttgtgtgatcatacagttatgtgggtggcttctagtttgcaacttcaagggacaagtattaatagttcagtgtatggcgttggtttgtgttgagcgtttgcacggtttggataatcttaaattttgacggacactgtggagactttctgttactaaatccttttgttttgaagctgttgctatttgtatttctcttgtcctttatattttttgtctgtttatttacgcttttattggaaatgtgaataagtaaagaattacttgtgttacttgccaagcagtgcacatttcatagtttcaaatctgtaatcagcaataaaaatcctaaaatatgtacctaagaacagct

SEQ ID NO: 3 - DNA, 1787 bp, Homo sapiens
  misc feature (180): n equals a,t,g, or c
  misc feature (205): n equals a,t,g, or c
  misc feature (1759): n equals a,t,g, or c
  misc feature (1772): n equals a,t,g, or c
ggtggaccagttccctcctgtggaacagtgggggaacctatgaccccagaggacgctgtgatctccaccttcaagccaggcaggctgccctgagacgaggagggctctggtcccgtcactctccatgccctgacaacagtgcttgtagctttgatgtggaacaggggccctgggcatttntgctgagaaccaaactgctgctgtnataacctctcctttggcccctaaaaggacctgtttttatctacctgtgtgacttgaagtggccatatgctgtcaggggtgcggagtggcccctgacttcactgctgtcccgggaacatggacccccaggcttggcgtaggtgtttgcttccttctactggcattcactgaagccactggggtggggggtggggggtgggagtctctaaagagagactgtcatgggtcattccccacaagagccacatcctcacacctgacagatgcacggcccaaggggctgcagcctgttgcaattccatgcttcccccgccaaccagctcctgctgccatccccagggaggtggcccaggaaggtgcctggcccagaataaggaactggcatactgcaaagtccccagccctgcctctggtggacagcatcgtcctggaatggccacggagtgatgagttgtgtgcttgtccctggcagtggcaggctgtgtcctatggacatcttggcaggacatggaatttggcctcatgacaggcccaactagggataggaaggaaaatgaagagagccagtatttccccttctccagaagcaggtactcagctttctgggaaaagcgtgcctccagccgtggggacaggccatcctactgactacctcttgcttggcatgaaataaaytgctatcctccccttggaatytaccgscactstacatcctactgctttggcctccctctcctctcaccagatggcatgtggtgtggcacctgtggctggacacaggaggcctcaggatcacaaatgttacactagacatatgtcctaatgtgctgcccagaaacctcaactgttccccagctactgaggggcactgtcagcgagatgttgggtctggaggtgatgagatcgggccacacttgagctgagtcaccagaccctattgcttcaacagtgcttgcccccgccagcttgtcccagccactctagctgctggatgtgatcctgggacatgtactccaagcctccgtcacaaaaaaaaaatcaccagctgccatagacacgggggaagcttkcggagcccaggtgaacaagctcagcaatcggacatctctggggaaaggaaggtggcacagaccatgttccctggttcctccctgccccttgccaggcttccttattccttactatgggaagaggtcatatcccttccctgcccctcgctgtctttagcaagcaggtttcactgcttcattagaagaggacaagtcaaaagtgaatcatttttcactacttaaggaataaatccaagagctttccagagactggctgctgcagccctgggaatgtctgtggaattactatgtggaaatggaactttgtgttatgctctagacattacagttatttgagtgttactcgttactgttgaggtcagtgcttcgtggcaaatggctgtactggatatcccagctctgctgcccttgttttgctgcatgttaaataaaaccattttcactgtaaaaaaaaaaaaaaaaaaaaamcycgggggggggcccgnacccattggcccntagggggggggttta

SEQ ID NO: 4 - DNA, 846 bp, Homo sapiens
  misc feature (726): n equals a,t,g, or c
aattcggcacaggtggcctttctgacactcctgggcgtccccatgggtgagctgaattctgcctctgggctagcccttttccagccaattccactgatcctgtgaaggctgcccaatttgagccacctggacgtcaaatgattgccatcagaaagagacaacytgaagaaaccaacaatgactatgaaacagctgacggcggctacatgactctgaaccccagggcacctactgacgatgataaaaacatctacctgactcttcctcccaacgaccatgtcaacagtaataactaaagagtaacgttatgccatgtggtcayactctcagcttgctgagtggatgacaaaaagaggggaattgttaaaggaaaatttaaatggagactggaaaaatcctgagcaaacaaaaccacctggcccttagaaatagctttaactttgcttaaactacaaacacaagcaaaacttcacggggtcatactacatacaagcataagcaaaacttaacttggatcatttctggtaaatgcttatgttagaaataagacaaccccagccaatcacaagcagcctactaacatataattaggtgactagggactttctaagaagatacctacccccaaaaaacaattatgtaattgaaaaccaaccgattgcctttattttgcttccacattttcccaataaatacttgcctgtgacattttgccactggaacacntaaacttcatgaattgcgcctcagatttttcctttaacatctttttttttttttgacagrgtytcaatctgttacccaggctggagtgcagtggtgctatcttggctcactgcaaacccg

SEQ ID NO: 5 - DNA, 1277 bp, Homo sapiens
ccagcgccggctagccggacgccctaggcttccgcgagatcttcggtgggggtacgggtgttttacgccaggacgctgatgcgtttgggttctcgtctgcagaccctctggacctggtcacgattccataatgtaccacaacagtagtcagaagcggcactggaccttctccagcgaggagcagctggcaagactgcgggctgacgccaaccgcaaattcagatgcaaagccgtggccaacgggaaggttcttccgaatgatccagtctttcttgagcctcatgaagaaatgacactctgcaaatactatgagaaaaggttattggaattctgttcggtgtttaagccagcaatgccaagatctgttgtgggtacggcttgtatgtatttcaaacgtttttatcttaataactcagtaatggaatatcaccccaggataataatgctcacttgtgcatttttggcctgcaaagtagatgaattcaatgtatctagtcctcagtttgttggaaacctccgggagagtcctcttggacaggagaaggcacttgaacagatactggaatatgaactacttcttatacagcaacttaatttccaccttattgtccacaatccttacagaccatttgagggcttcctcatcgacttaaagacccgctatcccatattggagaatccagagattttgaggaaaacagctgatgactttcttaatagaattgcattgacggatgcttaccttttatacacaccttcccaaattgccctgactgccattttatctagtgcctccagggctggaattactatggaaagttatttatcagagagtctgatgctgaaagagaacagaacttgcctgtcacagttactagatataatgaaaagcatgagaaacttagtaaagaagtatgaaccacccagatctgaagaagttgctgttctgaaacagaagttggagcgatgtcattctgctgagcttgcacttaacgtaatcacgaagaagaggaaaggctatgaagatgatgattacgtctcaaagaaatccaaacatgaggaggaagaatggactgatgacgacctggtagaatctctctaaccatttgaagttgatttctcaatgctaactaatcaagagaagtaggaagcatatcaaacgtttaactttatttaaaaagtataatgtgaaaacataaaatatattaaaacttttctattgttttctttccctttcacagtaactttatgtaaaataaaccatcttcaaaagagct

SEQ ID NO: 6 - DNA, 2202 bp, Homo sapiens
  misc feature (29): n equals a,t,g, or c
cgaatccctcctcctcttctttacctctntcccttctcctcaggttctctatcgacgagtctggtagctgagcgttgggctgtaggtcgctgtgctgtgtgatcccccagagccatgcccgagatagtggatacctgttcgttggcctctccggcttccgtctgccggaccaagcacctgcacctgcgctgcagcgtcgactttactcgccggacgctgaccgggactgctgctctcacggtccagtctcaggaggacaatctgcgcagctggttttggatacaaaggaccttacaatagaaaaagtagtgatcaatggacaagaagtcaaatatgctcttggagaaagacaaagttacaagggatcgccaatggaaatctctcttcctatcgctttgagcaaaaatcaagaaattgttatagaaatttcttttgagacctctccaaaatcttctgctctccagtggctcactcctgaacagacttctgggaaggaacacccatatctctttagtcagtgccaggccatccactgcagagcaatccttccttgtcaggacactccttctgtgaaattaacctatactgcagaggtgtctgtccctaaagaactggtggcacttatgagtgctattcgtgatggagaaacacctgacccagaagacccaagcaggaaaatatacaaattcatccaaaaagttccaataccctgctacctgattgctttagttgttggagctttagaaagcaggcaaattggcccaagaactttggtgtggtctgagaaagagcaggtggaaaagtctgcttatgagttttctgagactgaatctatgcttaaaatagcagaagatctgggaggaccgtatgtatggggacagtatgacctattggtcctgccaccatccttcccttatggtggcatggagaatccttgccttacttttgtaactcctactctactggcaggcgacaagtcactctccaatgtcattgcacatgaaatatctcatagctggacagggaatctagtgaccaacaaaacttgggatcacttttggttaaatgagggacatactgtgtacttggaacgccacatttgcggacgattgtttggtgaaaagttcagacattttaatgctctgggaggatggggagaactacagaattcggtaaagacatttggggagacacatcctttcaccaaacttgtggttgatctgacagatatagaccctgatgtagcttattcttcagttccctatgagaagggctttgctttacttttttaccttgaacaactgcttggaggaccagagattttcctaggattcttaaaagcttatgttgagaagttttcctataagagcataactactgatgactggaaggatttcctgtattcctattttaaagataaggttgatgttctcaatcaagttgattggaatgcctggctctactctcctggactgcctcccataaagcccaattatgatatgactctgacaaatgcttgtattgccttaagtcaaagatggattactgccaaagaagatgatttaaattcattcaatgccacagacctgaaggatctctcttctcatcaattgaatgagtttttagcacagacgctccagagggcacctcttccattggggcacataaagcgaatgcaagaggtgtacaacttcaatgccattaacaattctgaaatacgattcagatggctgcggctctgcattcaatccaagtgggaggacgcaattcctttggcgctaaagatggcaactgaacaaggaagaatgaagtttacccggcccttattcaaggatcttgctgcctttgacaaatcccatgatcaagctgtccgaacctaccaagagcacaaagcaagcatgcatcccgtgactgcaatgctggtggggaaagacttaaaagtggattaaagacctgcgtattgatgattttagagatttctcttttttaaatggaattcgtaaagaaatataaaacttcagctcacaattaaaactgtctttttagttttggctttttattgttttgttggtgattttactgaaataaagttgagctacttcttcttatagtggcatattctttgtaaattttaacaaggtttaatcttttgatttacaaattaaaaaattttgaattagctttaaaaaaaaaaaaaaaaaa

SEQ ID NO: 7 - DNA, 1298 bp, Homo sapiens
  misc feature (1295): n equals a,t,g, or c
gcagctggaggctctgtgtgtgggtcgctgatttcttggagcctgaaaagaaagtaacacagcagggatgaggacagatggtgtgagtcagtgagtgagtgacctgactaatagcctgggagggacagggcaggttttctgcagagcacggaagattcagctgaagtcagagaggtgaagccagtttcccagggtaacatagtgagccactcttagccttggccttcgacatgagatggagccctccttattccccatctggtccagttccttcacttacagatggcagcagtsaggtcttggggtagaaggaccctccaaagtcacacaaagtgcctgcctcctggtcccctcagctctctctctgcaacccagtgccatcaggatgagcaatcctggccaagcataatgacagagagaggcagacttcggggaagccctgactgtgcagagctaaggacacagtggagattctctggcactctgaggtctctgtggcaggcctggtcaggctctccatgaggttagaaggccaggtagtgttccagcagggtggtggccaagccaaccccatgattgatgtgtacgattcactcctttgagtctttgaatggcaactcagccccctgacctgaagacagccagcctaggcctctagggtgacctagagccgccttcagatgtgacccgagtaactttcaactgatgaacaaatctgcaccctacttcagatttcagtgggcattcacaycaccccccacaccactggctctgctttctcctttcattaatccattcacccagatatttcattaaaattatcacgtgccaggtcttaggatatgtcgtggggtgggcaaggtaatcagtgacagttgaagatttttttttcccagagcttatgtcttcatctgtgaaatgggaataagatacttgttgctgtcacagttattaccatccccccagctaccaaaattactaccagaactgttactatacacagaggctattgactgagcacctatcatttgccaagaaccttgacaagcacttctaatacagcatattatgtactattcaatctttacacaatgtcacgggaccagtattgtttcctcattttttataaggacactgaagcttggaggagttaaatgttttgagtattattccagagagcaagtggcagaggctggatccaaacccatcttcctggacctgaagcttatgcttccagccaccccactcctgagctgaataaagatgatttaagcttaaaaaaaaaaaaaaaaaangac

SEQ ID NO: 8 - DNA, 1763 bp, Homo sapiens
ttctcgcataggacctttccaccacagccagcacctggcatcgcaccattctgactcggtttctccaaactgaagcagcctctccccaggtccagctctggaggggagggggatccgactgctttggacctaaatggcctcatgtggctggaagatcctgcgggtggggcttggggctcacacacctgtagcacttactggtaggaccaagcatcttgggggggtggccgctgagtggcaggggacaggagtccactttgtttcgtggggaggtctaatctagatatcgacttgtttttgcacatgtttcctctagttctttgttcatagcccagtagaccttgttacttctgaggtaagttaagtaagttgattcggtatccccccatcttgcttccctaatctatggtcgggagacagcatcagggttaagaagacttttttttttttttttaaactaggagaaccaaatctggaagccaaaatgtaggcttagtttgtgtgttgtctcttgagtttgtcgctcatgtgtgcaacagggtatggactatctgtctggtggccccgtttctggtggtctgttggcaggctggccagtccaggctgccgtggggccgccgcctctttcaagcagtcgtgcctgtgtccatgcgctcagggccatgctgaggcctgggccgctgccacgttggagaagcccgtgtgagaagtgaatgctgggactcagccttcagacagagaggactgtagggagggcggcaggggcctggagatcctcctgcagaccacgcccgtcctgcctgtggcgccgtctccaggggctgcttcctcctggaaattgacgaggggtgtcttgggcagagctggctctgagcgcctccatccaaggccaggttctccgttagctcctgtgccccaccctgggccctgggctggaatcaggaatattttccaaagagtgatagtcttttgcttttggcaaaactctacttaatccaatgggtttttccctgtacagtagattttccaaatgtaataaactttaatataaagtagtcctgtgaatgccactgccttcgcttcttgcctctgtgctgtgtgtgacgtgaccggacttttctgcaaacaccaacatgttgggaaacttggctcgaatctctgtgccttcgtctttcccatggggagggattctggttccagggtccctctgtgtatttgcttttttgttttggctgaaattctcctggaggtcggtaggttcagccaaggttttataaggctgatgtcaatttctgtgttgccaagctccaagccccatcttctaaatggcaaaggaaggtggatggccccagcacagcttgacctgaggctgtggtcacagcggaggtgtggagccgaggcctaccccgcagacaccttggacatcctcctcccacccggctgcagaggccagaggcccccagcccagggctcctgcacttacttgcttatttgacaacgtttcagcgactccgttggccactccgagaggtgggccagtctgtggatcagagatgcaccaccaagccaagggaacctgtgtccggtattcgatactgcgactttctgcctggagtgtatgactgcacatgactcgggggtggggaaaggggtcggctgaccatgctcatctgctggtccgtgggacggtgcccaagccagaggctgggttcatttgtgtaacgacaataaacggtacttgtcatttcgggcaaaaaaaaaac

SEQ ID NO: 9 - DNA, 2155 bp, Homo sapiens
ggctttaagacctagagcgktcttatttgttgaagatcaatggaaaagtggctgaaagaccacaacatatgttgatgagagtatctgttgggatccacaaagaagacattgatgcagcaattgaaacatataatcttctttctgagaggtggtttactcatgcttcgcccactctcttcaatgctggtaccaaccgcccacaactttctagctgttttcttctgagtatgaaagatgacagcattgaaggcatttatgacactctaaagcaatgtgcattgatttctaagtctgctggaggaattggtgttgctgtgagttgtattcgggctactggcagctacattgctgggactaatggcaattccaatggccttgtaccgatgctgagagtatataacaacacagctcgatatgtggatcaaggtgggaacaagcgtcctggggcatttgctatttacctggagccttggcatttagacatctttgaattccttgatttaaagaagaacacaggaaaggaagagcagcgtgccagagatcttttctttgctctttggattccggatctcttcatgaaacgagtggagactaatcaggactggtctttgatgtgtccaaatgagtgtcctggtctggatgaggtttggggagaggaatttgagaaactatatgcaagttatgagaaacaaggtcgtgtccgcaaagttgtaaaagctcagcagctttggtatgccatcattgagtctcagacggaaacaggcaccccgtatatgctctacaaagattcctgtaatcgaaagagcaaccagcagaacctgggaaccatcaaatgcagcaacctgtgcacagaaatagtggagtacaccagcaaagatgaggttgctgtttgtaatttggcttccctggccctgaatatgtatgtcacatcagaacacacatacgactttaagaagttggctgaagtcactaaagtcgttgtccgaaacttgaataaaattattgatataaactactatcctgtaccagaggcatgcctatcaaataaacgccatcgccccattggaattggggtacaaggtctggcagatgcttttatcctgatgagatacccttttgagagtgcagaagcccagttactgaataagcagatctttgaaactatttattatggtgctctggaagccagctgtgaccttgccaaggagcagggcccatacgaaacctatgagggctctccagttagcaaaggaattcttcagtatgatatgtggaatgttactcctacagacctatgggactggaaggttctcaaggagaagattgcaaagtatggtataagaaacagtttacttattgccccgatgcctacagcttccactgctcagatcctggggaataatgagtccattgaaccttacaccagcaacatctatactcgcaggtcttgtcaggagaatttcagattgtaaatcctcacttattgaaagatcttaccgagcggggcctatggcatgaagagatgaaaaaccagattattgcatgcaatggctctattcagagcataccagaaattcctgatgacctgaagcaactttataaaactgtgtgggaaatctctcagaaaactgttctcaagatggcagctgagagaggtgctttcattgatcaaagccaatctttgaacatccacattgctgagcctaactatggcaaactcactagtatgcacttctacggctggaagcagggtttgaagactgggatgtattatttaaggacragaccagcagctaatccaatccagttcactctaaataaggagaagctaaaagataaagaaaaggtatcaaaagaggaagaagagaaggagaggaacacagcagccatggtgtgctctttggagaatagagatgaatgtctgatgtgtggatcctgaggaaagacttggaagagaccagcatgtcttcagtagccaaactacttcttgagcatagataggtatagtgggtttgcttgaggtggtaaggctttgctggaccctgttgcaggcaaaaggagtaattgatttaaagtactgttaatgatgwtaatgatttttttttaaactcatatattgggattttcaccaaaataatgcttttgaaaaaaaaaa

SEQ ID NO: 10 - DNA, 1208 bp, Homo sapiens
  misc feature (1159): n equals a,t,g, or c
cgaggaagtaccactcgctcagccagagagcaagcgagacattctgttcctctttgacggctcagccaatcttgtgggccagttccctgttgtccgtgactttctctacaagattatcgatgagctcaatgtgaagccagaggggacccgaattgcggtggctcagtacagcgatgatgtcaaggtggagtcccgttttgatgagcaccagagtaagcctgagatcctgaatcttgtgaagagaatgaagatcaagacgggcaaagccctcaacctgggctacgcgctggactatgcacagaggtacatttttgtgaagtctgctggcagccggatcgaggatggagtgcttcagttcctggtgctgctggtcgcaggaaggtcatctgaccgtgtggatgggccagcaagtaacctgaagcagagtggggttgtgcctttcatcttccaagccaagaacgcagaccctgctgagttagagcagatcgtgctgtctccagcgtttatcctggctgcagagtcgcttcccaagattggagatcttcatccacagatagtgaatctcttaaaatcagtgcacaacggagcaccagcaccagtttcaggtgaaaaggacgtggtgtttctgcttgatggctytgagggcgtcaggagcggcttccctctgttgaaagagtttgtccagagagtggtggaaagcctggatgtgggccaggaccgggtccgcgtggccgtggtgcagtacagcgaccggaccaggcccgagttctacctgaattcatacatgaacaagcaggacgtcgtcaacgctgtccgccagctgaccctgctgggagggccgacccccaacaccggggccgccytggagtttgtcctgaggaacatcctggtcagctctgcgggaagcaggataacagaaggtgtgccccagctgctgatcgtcctcacggccgacagtctggggatgatgtgcggaacccctccgtggtcgtgaagaggggtggggctgtgccatttggcattggcatcgggaacgctgacatcacagagatgcagaccatctccttcatcccggactttgccgtggccattcccacctttcgccagctggggaccgtccaacaggtcatytctgaragggtgacccagctcaccgcgnaggagctgagcwggytgcagcggttgtttgcagctkcttaccgagccca

SEQ ID NO: 11 - DNA, 2312 bp, Homo sapiens
  misc feature (2305): n equals a,t,g, or c
ctggagttccgctccggcaaggtggccttccgcgactgcgagggccgttacctggcgccgtcggggcccagcggcacgctcaaggcgggcaaggccaccaaggtgggcaaggacgagctctttgctctggagcagagctgcgcccaggtcgtgctgcaggcggccaacgagaggaacgtgtccacgcgccagggtatggacctgtctgccaatcaggacgaggagaccgaccaggagaccttccagctggagatcgaccgcgacaccaaaaagtgtgccttccgtacccacacgggcaagtactggacgctgacggccaccgggggcgtgcagtccaccgcctccagcaagaatgccagctgctactttgacatcgagtggcgtgaccggcgcatcacactgagggcgtccaatggcaagtttgtgacctccaagaagaatgggcagctggccgcctcggtggagacagcaggggactcagagctcttcctcatgaagctcatcaaccgccccatcatcgtgttccgcggggagcatggcttcatcggctgccgcaaggtcacgggcaccctggacgccaaccgctccagctatgacgtcttccagctggagttcaacgatggcgcctacaacatcaaagactccacaggcaaatactggacggtgggcagtgactccgcggtcaccagcagcggcgacactcctgtggacttcttcttcgagttctgcgactataacaaggtggccatcaaggtgggcgggcgctacctgaagggcgaccacgcaggcgtcctgaaggcctcggcggaaaccgtggaccccgcctcgctctgggagtactagggccggcccgtccttccccgcccctgcccacatggcggctcctgccaaccctccctgctaaccccttctccgccagtgggctccagggcgggaggcaagcccccttgcctttcaaactggaaaccccagagaaaacggtgcccccacctgtcgcccctatggactccccactctcccctccgcccgggttccctactcccctcgggtcagcggctgcggcctggccctgggagggatttcagatgcccctgccctcttgtctgccacggggcgagtctggcacctctttcttctgacctcagacggctctgagccttatttctctggaagcggctaagggacggttgggggctgggagccctgggcgtgtagtgtaactggaatcttttgcctctcccagccacctcctcccagccccccaggagagctgggcacatgtcccaagcctgtcagtggccctccctggtgcactgtccccgaaacccctgcttgggaagggaagctgtcgggtgggctaggactgacccttgtggtgtttttttgggtggtggctggaaacagcccctctcccacgtggcagaggctcagcctggctcccttccctggagcggcagggcgtgacggccacagggtctgcccgctgcacgttctgccaaggtggtggtggcgggcgggtaggggtgtgggggccgtcttcctcctgtctctttcctttcaccctagcctgactggaagcagaaaatgaccaaatcagtattttttttaatgaaatattattgctggaggcgtcccaggcaagcctggctgtagtagcgagtgatctggcggggggcgtctcagcaccctccccagggggtgcatctcagccccctctttccgtccttcccgtccagccccagccctgggcctgggctgccgacacctgggccagagcccctgctgtgattggtgctccctgggcctcccgggtggatgaagccaggcgtcgcccctccgggagccctggggtgagccgccggggcccccctgctgccagcctcccccgtccccaacatgcatctcactctgggtgtcttggtcttttattttttgtaagtgtcatttgtataactctaaacgcccatgatagtagcttcaaactggaaatagcgaaataaaataactcagtctgcagccccaggccggcctgtgtgtgtcttggggctgaggtgggtgggggggctgaggtgggtgggagggctggcgggacaggtaggcgccctggctccccagctcagtgctgggagtgtgcagtgggagggaggccgtggctccagtgggtgctccggagctcgtgggcccagcacacctccttaagcgggggatggagcgctgggasggggtggactgtggcccatgcgacccccagagccattaggaggagttctgtggtgagaagtggctgtggctcctcrtagggctnacgtcca

SEQ ID NO: 12 - DNA, 915 bp, Homo sapiens
ggaattcccgggtcgacccacgcgtccgcacggccctgcagattttccagcggatcccccggtggcctcatgtcgcgcagtggaaccgatcctcagcaacgccagcaggcgtcagaggcggacgcgcagcagcaaccttccgggcaaacgaccatcagcatatccgctacaacccgctgcaggatgagtgggtgctggtgtcagctcaccgcatgaagcggccctggcagggtcaagtggagccccagcttctgaagacagtgccccgccatgaccctctcaaccctctgtgtcctggggccatccgagccaacggagaggtgaatccccagtacgatagcaccttcctgtttgacaacgacttcccagctctgcagcctgatgcccccagtccaggacccagtgatcatccccttttccaagcaaagtctgctcgaggagtctgtaaggtcatgtgcttccacccctggtcggatgtaacgctgccactcatgtcggtccctgagatccgggctgttgttgatgcatgggcctcagtcacagaggagctgggtgcccagtacccttgggtgcagatctttgaaaacaaaggtgccatgatgggctgttctaacccccacccccactgccaggtatgggccagcagtttcctgccagatattgcccagcgtgaggagcgatctcagcaggcctataagagtcagcatggagagcccctgctaatggagtacagccgccagagctactcaggaaggaacgtctggtcctaaccagtggagcactggttagtactggtccccttctgggcaaaatggccctaccagacactgctgctgccccgtcggcatgtgcggcggctacctgagcttgacccctgctgagcgtgatgrtctagcctccatcatgaagaagctc

SEQ ID NO: 13 - DNA, 1452 bp, Homo sapiens
  misc feature (974): n equals a,t,g, or c
  misc feature (1432): n equals a,t,g, or c
  misc feature (1437): n equals a,t,g, or c
  misc feature (1439): n equals a,t,g, or c
ggcagaggcgcctctttggcagctggtcacatggtgagggtgggggtgagggggcctctctagcttgcggcctgtgtctatggtcgggccctctgcgtccagctgctccggaccgagctcgggtgtatggggccgtaggaaccggctccggggccccgataacgggccgcccccacagcaccccgggctggcgtgagggtctcccttgatctgagaatggctacctctcgatatgagccagtggctgaaattggtgtcggtgcctatgggacagtgtacaaggcccgtgatccccacagtggccactttgtgccytcaagagtgtgagagtccccaatggaggaggaggtggaggaggccttcccatcagcacagttcgtgaggtggctttactgaggcgactggaggcttttgagcatcccaatgttgtccggctgatggacgtctgtgccacatcccgaactgaccgggagatcaaggtaaccctggtgtttgagcatgtagaccaggacctaaggacatatctggacaaggcacccccaccaggcttgccagccgaaacgatcaaggatctgatgcgccagtttctaagaggcctagatttccttcatgccaattgcatcgttcaccgagatctgaagccagagaacattctggtgacaagtggtggaacagtcaagctggctgactttggcctggccagaatctacagctaccagatggcacttacacccgtggttgttacactctggtaccgagctcccgaagttcttctgcagtccacatatgcaacacctgtggacatgtggagtgttggctgtatctttgcagagatgtttcgtcgaaagcctctcttctgtggaaactctgaagccgaccagttgggcaaaatctttgacctgattgggctgcctccagaggatgactggcctcgagatgtatccctgccccgtggagcctttccccccagaggnccccgcccagtgcagtcggtggtacctgagatggaggagtcgggagcacagctgctgctggaaatgctgacttttaacccacacaagcgaatctctgcctttcgagctctgcagcactcttatctacataaggatgaaggtaatccggagtgagcaatggagtggctgccatggaaggaagaaaagctgccatttcccttctggacactgagagggcaatctttgcctttatctctgaggctatggagggtcctcctccatctttctacagagattactttgctgccttaatgacattcccctcccacctctccttttgaggcttctccttctccttcccatttctctacactaaggggtatgttccctcttgtccctttccctacctttatatttggggtccttttttatacaggaaaaacaaaacaaagaaawaaaaaaaaaaaaaaaaaaaaaanggggntnggggggggccccg

SEQ ID NO: 14 - DNA, 441 bp, Homo sapiens
  misc feature (348): n equals a,t,g, or c
  misc feature (402): n equals a,t,g, or c
  misc feature (437): n equals a,t,g, or c
cacccaggccgggaacagcagcgagcaggccayaccacctgccaggccctcggggtgtgtgggaccatgtccagccctctccagtgtatccacagccccgacctttgatgagaactcagctgtccagctgcaaaggaaaagccaagtgagacgggctctgggaccatggtgaccaggctcttcccctgctccctggccctcgccagctgccaggctgaaaagaagcctcagctcccacaccgccctcctcamcgcccttcctcggsagtcattccactggtggacmacgggccccmagccctgtgtcggyttgtttgtctcagytcaaccamagtytgacamcagagnccayttccatctctytggtgttaagcaaaassaagggaagatttggaagagttntgaagcttcaaaactaacaagacttccaagggttnggct

SEQ ID NO: 15 - DNA, 524 bp, Homo sapiens
  misc feature (353): n equals a,t,g, or c
  misc feature (440): n equals a,t,g, or c
agcgctactccgtcatcctgctcgacacgctgctgggccgcatgctgccccagctggtctgccgcctcgtcctccggtgctccatggatgacagcgctggcccaagagaatggctgccgcgagactctgagtgccacctctgcatgtccgtgaccacccaggccgggaacagcagcgagcaggccataccacaggcaatgctccaggcctgtgttggctcctggctggacagggaaaagtgcaagcaatttgtggagcagcacacgccccagctgctgaccctggtgcccaggggctgggatgcccacaccacctgccaggcctcggggtgtktgggaccatgtccagccctntccagtgtatccamagccccgacctttgatgagaactcagytktccaggcaggacatacacacagtccctctctggccctcatcctnctcagctgcaaaggaaaagccaagtgagacgggctctgggaccatggtgaccaggctcttcccctgcttccctgggcctcgcca

SEQ ID NO: 16 - DNA, 2432 bp, Homo sapiens
  misc feature (236): n equals a,t,g, or c
  misc feature (245): n equals a,t,g, or c
  misc feature (763): n equals a,t,g, or c
agtgctgctccggagaggggctgcagatccccaccctctccgctgcacctgactgcagccagcccctgggacgtgaatccttctcctggatggctcctccagtttcccagcttcttattttgatgaaatgaagagtttcgccaaggctttcatttcaaaagccaatatagggcctcgtctcactcaggtgtcagtgctgcagtatggaagcatcaccaccattgacgtgccatggnaacgtggtncccggagaaagcccatttgctgagccttgtggacgtcatgcagcgggagggaggccccagccaaatcggggatgccttgggctttgctgtgcgatacttgacttcagaaatgcatggtgccaggccgggagcctcaaaggcggtggtcatcctggtcacggacgtctctgtggattcagtggatgcagcagctgatgccgccaggtccaacagagtgacagtgttccctattggaattggagatcgctacgatgcagcccagctacggatcttggcaggcccagcaggcgactccaacgtggtgaagctccagcgaatcgaagacctccctaccatggtcaccttggggcaattccttcctccacaaactgtgctctggatttgttaggatttgcatggatgaggatgggaatgagaagaggcccggggacgtctggaccttgccagaccagtgccacaccgtgacttgccagccagatggccagaccttgctgaagagtcatcgggtcaactgtganccgggggctgaggccttcgtgccctaacagccagtcccctgttaaagtggaagagacctgtggctgccgctggacctgcccctgcgtgtgcacaggcagctccactcggcacatcgtgacctttgatgggcagaatttcaagctgactggcagctgttcttatgtcctatttcaaaacaaggagcargacctggaggtgattctccataatggtgcctgcagccctggagcaaggcagggctgcatgaaatccatcgaggtgaagcacagtgccctctccgtcgagctgcacagtgacatggaggtgacggtgaatgggagactggtctctgttccttacgtgggtgggaacatggaagtcaacgtttatggtgccatcatgcatgaggtcagattcaatcaccttggtcacatcttcacattcactccacaaaacaatgagttccaactgcagctcagccccaagacttttgcttcaaagacgtatggtctgtgtgggatctgtgatgagaacggagccaatgacttcatgctgagggatggcacagtcaccacagactggaaaacacttgttcaggaatggactgtgcagcggccagggcagacgtgccagcccatcctggaggagcagtgtcttgtccccgacagctcccactgccaggtcctcctcttaccactgtttgctgaatgccacaaggtcctggctccagccacattctatgccatctgccagcaggacagttgccaccaggagcaagtgtgtgaggtgatcgcctcttatgcccacctctgtcggaccaacggggtctgcgttgactggaggacacctgatttctgtgctatgtcatgcccaccatctctggtctacaaccactgtgagcatggctgtccccggcactgtgatggcaacgtgagctcctgtggggaccatccctccgaagctgtttctgccctccagataaagtcatgttggaaggcagctgtgtccctgaagaggcctgcactcagtgcattggtgaggatggagtccagcaccagttcctggaagcctgggtcccggaccaccagccctgtcagatctgcacrtgcctcagcgggcggaaggtcaactgcacaacgcagccctgccccacggccaaagctcccacgtgtggcctgtktgaagtagcccgcctccgccagaatgcagaccagtgctgccccgagtatgagtgtgtgtgtgacccagtgagctgtgacctgcccccagtgcctcactgtgaacgtggcctccagcccacactgaccaaccctggcgagtgcagacccaacttcacctgcgcctgcaggaaggaggagtgcaaaagagtgtccccaccctcctgccccccgcaccgtttgcccacccttcggaagacccagtgctgtgatgagtatgagtgtgcctgcaactgtgtcaactccacagtgagctgtccccttgggtacttggcctcaaccgccaccaatgactgtggctgtaccacaaccacctgccttcccgacaaggtgtgtgtccaccgaagcaccatctaccctgtgggccagttctgggaggagggctgcgatgtgtgcacctgcaccgacatggaggatgccgtgatgggcctccgcgtggcccagtgctcccagaagccctgtgaggacagct

SEQ ID NO: 17 - DNA, 372 bp, Homo sapiens
  misc feature (357): n equals a,t,g, or c
  misc feature (367): n equals a,t,g, or c
gaacaactgacaggctcaagagcaaaaagcgtgggcagttggagaagaagcagccagagtgtgaagaagcccacggaaggaaagtccagggaggaggaaaagaagcagaagttttggcatctgttccctggctgtgccaagatgggcgattggagcttcctgggaaatttcctggaggaagtacacaagcactcgaccgtggtaggcaaggtctggctcactgtcctcttcatattccgtatgctcgtgctgggcacagctgctgagtcttcctggggggatgagcaggctgatttccggtgtgatacgattcagcctggctgccagaatgtctgstasgaccaggcttttcccatnttcccacatncgtta

SEQ ID NO: 18 - DNA, 929 bp, Homo sapiens
  misc feature (431): n equals a,t,g, or c
  misc feature (613): n equals a,t,g, or c
  misc feature (918): n equals a,t,g, or c
  misc feature (929): n equals a,t,g, or c
attccctgttcattctcatttactgtctaaagttgaggagatgggatgtcccagatgatagggctcctgggatttcagacccaagaccagcaggactccagtcacctctaccccagctctccaggacacagcgctcccaactctgagtgacgtcccacctctggtccttgcagcacaaccaacgtgggaatcacaccctccagacctcccacagctccaccccagactgggcgccggccctgcctccatttcagctgtgacaacctcagagccgtgttggcccaagcatgacaaggacgtatgaaaacttccagtacttggagaataaggtgaaagtccaggggtttaaaaatgggscacttcctctccagtccctcctgcagcgtctcygctctgggscctgccatctcctgctgtccctggggctcggnctcctgctgctggtcatcatctgtgtggttggattccaaaattccaaatttcagagggacctggtgaccctgagaacagattttagcaacttcacctcaaacactgtggcggagatccaggcatgacttcccagggcagcagcttggaagaaacgatagcatctctgaaagctgaggtgganggtttcaagcaggaacggcaggcagttcattctgaaatgctcctgcgagtccagcagctggtgcaagacctgaagaaactgacctgccaggtggctactctcaacaacaatggcctccactgaagggacctgctgcccygtcaactgggtggagcaccaagacagctgctactggttctctcaytctgggatgtcctgggccgaagctgagaagtactgccarctgaagaacgcccacctggtggtcatcaaatccagggaggagcaagtgagggcttcttggtactcagttcctaagacatgtnccatttagggn

SEQ ID NO: 19 - DNA, 416 bp, Homo sapiens
  misc feature (196): n equals a,t,g, or c
  misc feature (369): n equals a,t,g, or c
  misc feature (383): n equals a,t,g, or c
ctggggcctaacaaaaagaaacctgccatgctgctcttcctcctctctgcactggtcctgctcacacagcccctgggctacctggaagcagaaatgaagacctactcccacagaacaatgcccagtgcttgcaccctggtcatgtgtagctcagtggagagtggcctgcctggtcgcgatggacgggatgggaganagggccctcggggcgagaagggggacccaggtttgccaggagctgcagggcaagcagggatgcctggacaagctggcccagttgggcccaaaggggacaatggctctgttggagaacctggaccaaagggagacacttgggccaagttggaccttcaggaacttccggtgttnctggtccaacttgnagagaaggtcccttggggaagcaaggggacata

SEQ ID NO: 20 - DNA, 1853 bp, Homo sapiens
  misc feature (36): n equals a,t,g, or c
aaattcccgggtcgacccacgcgtccgctacactgnaaccctgatggctacgaggtggcagcgcagatgggctcagagtttgggaactggggcgctgggactgtggactgaggagggctttgacatctttgaagatttcccggatctcaactctgtgctctggggagctgaggagaggaaatgggtcccctaccgggtccccaacaataacttgcccatccctgaacgctacctttcgccagatgccacggtatccacggaggtccgggccatcattgcctggatggagaagaaccccttcgtgctgggagcaaatctgaacggcggcgagcggctagtatcctacccctacgatatggcccgcacgcctacccaggagcagctgctggccgcaccatggcagcagcccggggggaggatgaggacgaggtctccgaggcccaggagactccagaccacgccatcttccggtggcttgccatctccttcgcctccgcacacctcaccttgaccgagccctaccgcggaggctgccaagccaggactacaccggcggcatgggcatcgtcaacggggccaagtggaacccccggaccgggactatcaatgacttcagttacctgcataccaactgcctggagctctccttctacctgggctgtgacaagttccctcatgagagtgagctgccccgcgagtgggagaacaacaaggaggcgctgctcaccttcatggagcaggtgcaccgcggcattaagggggtggtgacggacgagcaaggcatccccattgccaacgccaccatctctgtgagtggcattaatcacggcgtgaagacagccagtggtggtgattactggcgaatcttgaacccgggtgagtaccgcgtgacagcccacgcgaggggctacaccccgagcgccaagacctgcaatgttgactatgacatcggggccactcagtgcaayttcatcctggctcgctccaactggaagcgcatccgggagatcatggccatgaacgggaaccgscctatcccacacatagacccatcgcgccctatgaccccccaacagcgacgcctgcagcagcgacgcctacaacaccgcctgcgcttcgggcacagatgcggctgcggcgcctcaacgccaccaccaccctaggcccccacactgtgcctcccacgctgccccctgcccctgccaccaccctgagcactaccatagagccctggggcctcataccgccaaccaccgctggctgggaggagtcggagaykgagacctacacagaggtggtgacagagtttgggaccgaggtggagcccgaktttgggaccaaggtggagcccgaktttragacccagttggagcctgaktttgagacccagctggaacccgagtttgaggaagaggaggaggaggagaaagaggaggagatagccactggccaggcattccccttcacaacagtagagacctacacagtgaactttggggacttctgagatcagcgtcctaccaagaccccagcccaactcaagctacagcagcagcacttcccaagcctgctgaccacagtcacatcacccatcagcacatggaaggcccctggtatggacactgaaaggaagggctggtcctgcccctttgagggggtgcaaacatgactgggacctaagagccagaggctgtgtagaggctcctgctccacctgccagtctcgtaagagatggggttgctgcagtgttggagtaggggcagagggagggagccaaggtcactccaataaaacaagctcatggcamaaaaaaaaaaaaaaaaaaaaaaaaaaaaaaaaaaaattctcggtcg

SEQ ID NO: 21 - DNA, 1707 bp, Homo sapiens
  misc feature (17): n equals a,t,g, or c
  misc feature (21): n equals a,t,g, or c
  misc feature (46): n equals a,t,g, or c
  misc feature (99): n equals a,t,g, or c
  misc feature (145): n equals a,t,g, or c
caattgtggcccttggntgtncccgaacttgacgcaataacaaaanatggcgtcagttggggtccattgcaaaacaggggaaaagggttggggaagggnccctccttccttggggggaacccttttttgccccaactctcagaanggccccctacccgcccctcccgccgtctccccttcacctaagttcctccagagccgtctccctgggaattagccctctcctaactccgaccacagaaagctcagctttcaacctaagcttttggagtttaggctgtagtccctaagagagtctctagaaaccctgcccctagttttaagtttcgcccaatgaaaaaacaaaaggagagggacagaaggcgggtcggtgacgtaatgcgggttgattggcatgcaggccttggacgtccaggattagccacgcatttcgccaatccagaggcaggggagggacggtgcaggcgcagagtattgggtttggctggcctcgatttaaagagacagaagctgtcggggtcctggaagacggtccccaataccctccccccaagtccttgggaccacttgggtccccagagctggggagatggtttgtggcggctttgcctgctccaagaatgcgctttgcgctctcaacgtggtctacatgctggtgagcttgttgctcattggagtggctgcttggggcaagggcctgggtctggtgtccagcatccacatcatcggcggagtcattgctgtgggagtcttccttctccttattgcagtggctggactggtgggtgctgtcaaccaccaccaagtcctgctgttcttttacatgatcatccttggtttggtcttcatcttccaatttgtaatctcttgctcatgtctggctattaaccgaagcaaacagacagatgtcatcaatgcttcttggtgggtcatgagcaacaagactcgggatgaactggaaagaagttttgattgttgtggcttattcaacctcacaaccctgtatcaacaagattatgatttctgcactgcaatctgcaagagccagagccccacatgccagatgtgtggagaaaagtttcttaagcattcagacgaagccctgaaaatcctagggggtgttggactcttctttagctttacagagatccttggtgtttggctarcaatgaratttcggaatcagaaaggatcctagagccaaccccagtgcctttctatgaractttggatcctctgamttttcttctgctctctctaagctttctcttcctcccttagggaatatctagggtctgtaaccgttttggtttgagaaaaaggaaaggccccttgtcacatcctctaaaattgatggaatagcaagactttatgccttggacatattttagtgggagccagactataaggaataaaaggaaaaactttcttcctctctctccaagaggatatgggaagcttctgtgagtgcataggatgggggctggagtcattcttagctgtttcccttcctctgtccatatactggatcacctcaacataccctggtgtggctctaagggtaaatcagggatagggccaaggagaaaacaaccaagaactctttcctgtaataagcaggatccagtttgagaaagtttagcgaatataaaagtaaaagccwtttaaaaatctatattctttttttttttttgacacaggttttgg

SEQ ID NO: 22 - DNA, 870 bp, Homo sapiens
  misc feature (847): n equals a,t,g, or c
cctggcttgagtagggcagagagcaccgcccagcagccagtgggttcccgcgcgtgccgagactctgaggccttgcacccccacgatcccgtacgatggccgtcaagaagatcgcgatcttcggcgccactggccagaccgggctcaccaccctggcgcaggcggtgcaagcaggttacgaagtgacagtgctggtgcgggactcctccaggctgccatcagaggggccccggccggcccacgtggtagtgggagatgttctgcaggcagccgatgtggacaagaccgtggctgggcaggacgctgtcatcgtgctgctgggcacccgcaatgacctcagtcccacgacagtgatgtccgagggcgcccggaacattgtggcagccatgaaggctcatggtgtggacaaggtcgtggcctgcacctcggctttcctgctctgggaccctaccaaggtgcccccacgactgcaggctgtgactgatgaccacatccggatgcacaaggtgctgcgggaatcaggcctgaagtacgtggctgtgatgccgccacacataggagaccagccactaactggggcgtacacagtgaccctggatggacgagggccctcaagggtcatctccaaacatgacctgggccatttcatgctgcgctgcctcaccaccgatgagtacgacggacacagcacctacccctcccaccagtaccagtagcactctgtccccatctgggagggtggcattctgggacatgaggagcaaaggaagggggcaataaatgttgagccaagagcttcaaattactctagagaaaaaaaaaaaaaaaaaaaatctccggggggggncccgttccccattggccctttgg

SEQ ID NO: 23 - DNA, 654 bp, Homo sapiens
  misc feature (526): n equals a,t,g, or c
  misc feature (640): n equals a,t,g, or c
  misc feature (654): n equals a,t,g, or c
ggcagagggatccagcccgggagaggaccgagctggaggagctgggtgtggggtgcgttgggctggtggggaggcctagtttgggtgcaagtaggtctgattgagcttgtgttgtgctgaagggacagccctgggtctaggggagagagtccctgagtgtgagacccgccttccccggtcccagcccctcccagttcccccagggacggccacttcctggtccccgacgcaaccatggctgaagaacaaccgcagtcgaattgttcgtgaaggctggcagtgatggggccaagattgggaactgcccattctcccagagactgttcatggtactgtggctcaagggagtcaccttcaatgttaccaccgttgacaccaaaaggcggaccgagacagtgcagaagctgtgcccaggggggcagctcccattcctgctgtatggcactgaagtgcacacagacaccaacaagattgaggaatttctggaggcagtgctgtgccctcccaggtaccccaagctggcagntctgaamcctgagtccaacacagytgggctggacatatttgccaaattttctgcctacatcaagaattccaaacccagcactcaattgacaatctggagaagggactcctgaangccctgaaggtttn

SEQ ID NO: 24 - DNA, 1400 bp, Homo sapiens
  misc feature (25): n equals a,t,g, or c
ggcagaggtggaatccatgccaganaatggatctctcctgctttctgcttgtggttcataggccatataactcaattctatgggataatagggcaatataccaatctcctgaggcttgtggatttctatgttatgccggtggttaatgtggatggttatgaactactcatggaaaaagaatcgaatgtggagaaagaaccgttctttctatgcgaacaatcattgcatcggaacagacctgaataggaactttgcttccaaacactggtgtgaggaaggtgcatccagttcctcatgctcggaaacctactgtggactttatcctgagtcagaaccagaagtgaaggcagtggctagtttcttgagaagaaatatcaaccagattaaagcatacatcagcatgcattcatactcccagcatatagtgtttccatattcctatacacgaagtaaaagcaaagaccatgaggaactgtctctagtagccagtgaagcagttcgtgctattgagaaaactagtaaaaataccaggtatacacatggccatggctcagaaaccttatacctagctcctggaggtggggacgattggatctatgatttgggcatcaaatattcgtttacaattgaacttcgagatacgggcacatacggattcttgctgccggagcgttacatcaaacccacctgtagagaagcttttgccgctgtctctaaaatagcttggcatgtcattaggaatgtttaatgcccctgattttatcattctgcttccgtattttaatttactgattccagcaagaccaaatcattgtatcagattatttttaagttttatccgtagttttgataaaagattttcctattccttggttctgtcagagaacctaataagtgctactttgccattaaggcagactagggttcatgtctttttaccctttaaaaaaaattgtaaaagtctagttacctactttttctttgattttcgacgtttgactagccatctcaagcaactttcgacgtttgactagccatctcaagcaagtttaatcaawgatcatctcacgctgatcattggatcctactcaacaaaaggaagggtggtcagaagtacattaaagatttctgctccaaattttcaataaatttctgcttgtgcctttagaaatacaaccatgcattccgtttgctccacggtaattaggcgatggcccagaaaggggaggggtgtcaaaaacgacaaacatagcctctcattccagctcagctgctcaataaacactgttgaacgaatgaatgagtggctctaggtactgtcaacaaatgccgcattttgcgcatttacaacagctgtttatggtaaggaattatgtaataaaaagagaaaactcacttaa

SEQ ID NO: 25 - DNA, 643 bp, Homo sapiens
  misc feature (34): n equals a,t,g, or c
  misc feature (590): n equals a,t,g, or c
  misc feature (603): n equals a,t,g, or c
  misc feature (614): n equals a,t,g, or c
  misc feature (619): n equals a,t,g, or c
  misc feature (634): n equals a,t,g, or c
attaccctcactaaagggaacaaaagctggagcnccaccgcggtgcggccgctctagaactagtggatcccccgggctgcaggaattcggcacgagcttcaaggttacttcgcggactggaacgctggccgcgcaggccctgagggctcgcggccccagtggcgcggccgcgatgcgctccatggcatctggaggtggtgttcccactgatgaagagcaggcgactgggttggagagggagatcatgctggctgcaaagaagggactggacccatacaatgtactggccccaaagggagcttcaggcaccagggaagaccctaatttagtcccctccatctccaacaagagaatagtaggctgcatctgtgaagaggacaataccagcgtcgtctggttttggctgcacaaaggcgaggcccagcgatgcccccgctgtggagcccattacaagctggtgccccagcagctggcacactgagcacctgcactaaattactcaaaatgtgctgtaaagtttcttctttccagtaaagactagccattgcattggctccttctcccataaaaaaaaaaaaaaaaaaaactcnggggggggcccgnwaccaattcgncctanagtgatcgtatttanaatttcact

SEQ ID NO: 26 - DNA, 1131 bp, Homo sapiens
ctgccatttcccaaataataactccagatttcataattccagtttttacattccgttatctttctggtacaaccattcccattcagccttaaatctgagtcctttttagcagcaacttttttcctgggatcctccttcgtggtcttctaagtcagtgttagttttgaaatttttggccctgcataagttctgcatagcatctaatgtcaaaatagaaccaactggtaatcacagtattatttagtgtggtttccatgacaacaaaaatacatacgaagaaaacttctcaggttactatgctgaaattccaaaatgtctgagttttgaatagtgatcactttgttctggtattgacgcaattatattaggaaaaaagttggttgactgtttttgtttaattgacttctaaaatgttcaaattgtctagttctaaaagtttactaaatgcctagtgcagttaaacatactcttgtttaagtgtgtgttgctaaattttttactgtcattactaaataatctgtgtggcaaaatgtgtgtcagcactttyccctccttttttatctcctattttcaggagtcaaatgtagccataaactgtatccttgtctgacactttagctaaaaatttccagttaggggagtttattgccaaattaaatttggctgttccccccaacccatatagatattaaggaaggtgtacttaaaaaatgtttggactgcttttaaaacctgagcaatgtcattaatccatatgtggactagtgatgaatagatattttcataagagtttaaatgctgatatttggtggaagtagagagtaactcatattctatcaattcaagtattcttactatggttgctttccctatttgttcaatagactgataatactggaatttatagagtttgagccattacaacttttgtgaggatgtgtttcaaacatttctggacaaatcttattttgtatttctggaagaatgtagtaatcttctagaccgcttaaaaccaatgctcccaagctgaatattcttgagaaatttgtttttattatgccattgacattcaatcagtgctcatatacagtaacttgtgatagraattgtattttattgcttttgggttat

SEQ ID NO: 27 - DNA, 164 bp, Homo sapiens
  misc feature (161): n equals a,t,g, or c
cccacgcgtccgcccacgcgtccgcaaataatggacctgatgttcaggaacttggaagaaacatgataggaaaattgctgaccaggaaatttgggaaagaggcatgtcaatagacctttcttttttttttttttttttttttttttttttttttttttttnaaa

SEQ ID NO: 28 - DNA, 660 bp, Homo sapiens
  misc feature (37): n equals a,t,g, or c
  misc feature (39): n equals a,t,g, or c
  misc feature (89): n equals a,t,g, or c
  misc feature (627): n equals a,t,g, or c
  misc feature (653): n equals a,t,g, or c
ccgggagctgggcgacgggcctggcgagcgaactcgngngtctcactcaggcaccagcccctccttgccccaggcttgagtgactcacngccctattcaggcaggagctgctcttctggggtatcgcgatccacttaaggatgaggcagacttggtgacaagctggtctgagcaggtatgggagccccctggggagacggaagaagggaggaagttgccttctgcctggggagggtttgagagggagagggaagcctagggctcccaccaaggctgatattgacagccagggtttggggctgaagccaggaaccgtcrctctctctggttcttactggtagccctcatgggggtccctgacgccagagcctccaaggctgcatgtgccagcccagggctgcccacatacccatgtatatcccagaataggcaccagggtagggaacccaaactagcatgagtgacagagcaggtggtcagggagaaacagacatcaaacccagccaggagagagacaccgcaacagagagacagagaagggaaaccagagacgagagggaaatgagacagagacggacagagcttcagagagtwaggaatgagcccgaggaaggttgacagttgatngagaaaagcagcagacagagcagagnattcttg

SEQ ID NO: 29 - DNA, 3136 bp, Homo sapiens
  misc feature (1467): n equals a,t,g, or c
  misc feature (3061): n equals a,t,g, or c
  misc feature (3089): n equals a,t,g, or c
  misc feature (3111): n equals a,t,g, or c
  misc feature (3113): n equals a,t,g, or c
gcccacgcgtcckctttttctccaaaggagtgcttgtggagatcggatcttttctccagcaattgggggaaagaaggctttttctctgaattcgcttagtgtaaccagcggcgtatattttttaggcgccttttcgaaaacctagtagttaatattcatttgtttaaatcttattttatttttaagctcaaactgcttaagaataccttaattccttaaagtgaaataattttttgcaaaggggtttcctcgatttggagctttttttttcttccaccgtcatttctaactcttaaaaccaactcagttccatcatggtgatgttcaagaagatcaagtcttttgaggtggtctttaacgaccctgaaaaggtgtacggcagtggcgagaaggtggctggccgggtgatagtggaggtgtgtgaagttactcgtgtcaaagccgttaggatcctggcttgcggagtggctaaagtgctttggatgcagggatcccagcagtgcaaacagacttcggagtacctgcgctatgaagacacgcttcttctggaagaccagccaacaggtgagaatgagatggtgatcatgagacctggaaacaaatatgagtacaagttcggctttgagcttcctcaggggcctctgggaacatccttcaaaggaaaatatgggtgtgtagactactgggtgaaggcttttcttgaccgcccgagccagccaactcaagagacaaagaaaaactttgaagtagtggatctggtggatgtcaatacccctgatttaatggcacctgtgtctgctaaaaaagaaaagaaagtttcctgcatgttcattcctgatgggcgggtgtctgtctctgctcgaattgacagaaaaggattctgtgaaggtgatgagatttccatccatgctgactttgagaatacatgttcccgaattgtggtccccaaagctgccattgtggcccgccacacttaccttgccaatggccagaccaaggtgctgactcagaagttgtcatcagtcagaggcaatcatattatctcagggacatgcgcatcatggcgtggcaagagccttcgggttcagaagatcaggccttctatcctgggctgcaacatccttcgagttgaatattccttactgatctatgttagcgttcctggatccaagaaggtcatccttgacctgcccctggtaattggcagcagatcaggtctaagcagcagaacatccagcatggccagccgaaccagctctgagatgagttgggtagatctgaacatccctgataccccagaagctcctccctgctatatggatgtcattcctgaagatcaccgattggagagcccaaccactcctctgctagatgacatggatggctctcaagacagccctatctttatgtatgcccctgagttcaagttcatgccaccaccgacttatactgaggtgggatccctgncatctttactgttaaatttgtcctaagctttctataagaagttgacttagacggattgctaaactggtttgttctttttgttcttacctgaactgaaatagtctgtttctttctttaggtggatccctgcatcctcaacaacaatgtgcagtgagcatgtggaagaaaagaagcagctttacctacttgtttctttttgtctctcttcctggacactcactttttcagagactcaacagtctctgcaatggagtgtgggtccaccttagcctctgacttcctaatgtaggaggtggtcagcaggcaatctcctgggccttaaaggatgcggactcatcctcagccagcgcccatgttgtgatacaggggtgtttgttggatgggtttaaaaataactagaaaaactcaggcccatccattttctcagatctccttgaaaattgaggccttttcgatagtttcgggtcaggtaaaaatggcctcctggcgtaagcttttcaaggttttttggaggctttttgtaaattgtgataggaactttggaccttgaacttacgtatcatgtggagaagagccaatttaacaaactaggaagatgaaaagggaaattgtggccaaaactttgggaaaaggaggttcttaaaatcagtgtttcccctttgtgcacttgtagaaaaaaaagaaaaaccttctagagctgatttgatggacaatggagagagctttccctgtgattataaaaaaggaagctagctgctctacggtcatctttgcttagagtatactttaacctggcttttaaagcagtagtaactgccccaccaaaggtcttaaaagccatttttggagcctattgcactgtgttctcctactgcaaatattttcatatgggaggatggttttctcttcatgtaagtccttggaattgattctaaggtgatgttcttagcactttaattcctgtcaaattttttgttctccccttctgccatcttaaatgtaagctgaaactggtctactgtgtctctagggttaagccaaaagacaaaaaaaattttactacttttgagattgccccaatgtacagaattatataattctaacgcttaaatcatgtgaaagggttgctgctgtcagccttgcccactgtgacttcaaacccaaggaggaactcttgatcaagatgcccaaccctgtgatcagaacctccaaatactgccatgagaaactagagggcaggtcttcataaaagccctttgaacccccttcctgccctgtgttaggagatagggatattggcccctcactgcagctgccagcacttggtcagtcactctcagccatagcactttgttcactgtcctgtgtcagagcactgagctccacccttttctgagagttattacagccagaaagtgtgggctgaagatggttggtttcatgtttttgtattatgtatctttttgtatggtaaagactatattttgtacttaaccagatatatttttaccccagatggggatattctttgtaaaaaatgaaaataaagtttttttaatggaaaaaaaaaaaaaaaaaaaagggcggcygctcntagaggatccaagcttacgtacgcgtgncatgcgacgtccaaagcccttncnaaagtggtcacctaaattccatt

SEQ ID NO: 30 - DNA, 2248 bp, Homo sapiens
  misc feature (2220): n equals a,t,g, or c
  misc feature (2242): n equals a,t,g, or c
  misc feature (2243): n equals a,t,g, or c
  misc feature (2247): n equals a,t,g, or c
ctgttgtccacctttatgctctaacttggaggcagagacccaagcagctggaggctctgtgtgtgggtcgctgatttcttggagcctgaaaagaagcaggagcagcgactggacccagagccatgtggctgtgccctctggccctcamcctcatcttgatggcagcctctggtgctgcgtgcgaagtgaaggacgtttgtgttggaagccctggtatccccggcactcctggatcccacggcctgccaggcagggacgggagagatggtstcaaaggagaccctggccctccaggccccatgggtccgcctggagaaacaccatgtcctcctgggaataatgggctgcctggagcccctggtgtccctggagagcgtggagagaagggggargctggcgagagaggccctccagggcttccagctcatctagatgaggagctccaagccacactccacgacttcagacatcaaatcctgcagacaaggggagccctcagtctgcagggctccataatgacagtaggagagaaggtcttctcyagcaatgggcagtccatcacttttgatgccattcaggaggcatgtgccagagcaggcggccgcattgctgtcccaaggaatccagaggaaaatgaggccattgcaagcttcgtgaagaagtacaacacatatgcctatgtaggcctgactgagggtcccagccctggagacttccgctactcagaygggacccctgtaaactacaccaactggtaccgaggggagcctgcaggtcggggaaaagagmagtgtgtggagatgtacacagatgggcagtggaatgacaggaactgcctgtactcccgactgaccatctgtgagttctgagaggcatttaggccatgggacagggaggatcctgtctggccttcagtttccatccccaggatccacttggtctgtgagatgctagaactccctttcaacagaattcacttgtggctattagagctggaggcacccttagccacttcattcccctgatgggccctgactcttccccataatcactgaccagccttgacactccccttgcaaaccatcccagcactgcaccccaggcagccactcctagccttggcctttggcatgagatggaggcctccttattccccatctggtccagttccttcacttacagatggcagcagtgaggccttggggtagaaggatcctccaaagtcacacagagtgcctgcctcctggtcccctcagctctgcctctgcagcccactgcctgcccagtgccatcaggatgagyagtmccggccaagcataatgacagagagaggcagatttcagggaagccctgactgtgtggagctaaggacacagtrkagattctctggcactctgaggtctctgtggcaggcctggtcaggctctccaggtggtcagagggcccagtggtkccccagcacggtggtgcccaagccaaccctgtgactgacatgtacgattcactcctttgagtctttggatgccaactcagccccctgacctggaggcagccggccaaggcctctagggaagagccccccactgcagacatgacccgagtaactttctgctgatgaacaaatctgcaccccacttcagacctcggtgggcattcacaccaccccccatgccaccggctccactttccccttttattaatacattcacccagataatcattaaaattaacatgtgccaggtcttaggatgtgtcttggggtgggcacagtacccggtgactcttggggatatttatttattttccctgagcctatatcttcatctgtgaaatggggataaaaatacttgttgctgtcacaattattaccatctctccagctagcaaaattactaccagagccgttactacacacaaaggctattgaccgagcacataccatgtgccacacaccttgacaaratcttttaatacagtttattatgtactattcaatctttacacaatgtcacgggaccagtattgtttacccaattttttataaggacactgaagcttagaggagtgaaatgttttgagtgttatttcagagagcaaatggcaaagactggatccaaacccatcttcctggacctgaagttcatgctcccagccaccccacccctgagctgaataaagatgatttaagcataawaaaaamaaaaaaaaaatgccccccgngggggggcccggtacccaattnncccna

SEQ ID NO: 31 - DNA, 2047 bp, Homo sapiens
  misc feature (2011): n equals a,t,g, or c
  misc feature (2033): n equals a,t,g, or c
gaaacatccaaggtggtcttgaaggacactgggatcctgtaacacagccccggatatctgtgttaccagccttgtctcggccacctcaaggataatcactaaattctgccgaaaggactgaggaacggtgcctggaaaagggcaagaatatcacggcatgggcatgagtagcttgaaactgctgaagtatgtcctgtttttcttcaacttgctcttttggatctgtggctgctgcattttgggctttgggatctacctgctgatccacaacaacttcggagtgctcttccataacctcccctccctcacgctgggcaatgtgtttgtcatcgtgggctctattatcatggtagttgccttcctgggctgcatgggctctatcaaggaaaacaagtgtctgcttatgtcgttcttcatcctgctgctgattatcctccttgctgaggtgaccttggccatcctgctctttgtatatgaacagaagctgaatgagtatgtggctaagggtctgaccgacagcatccaccgttaccactcagacaatagcaccaaggcagcgtgggactccatccagtcatttctgcagtgttgtggtataaatggcacgagtgattggaccagtggcccaccagcatcttgcccctcagatcgaaaagtggagggttgctatgcgaaagcaagactgtggtttcattccaatttcctgtatatcggaatcatcaccatctgtgtatgtgtgattgaggtgttggggatgtcctttgcactgaccctgaactgccagattgacaaaaccagccagaccatagggctatgatctgcagtagttctgtggtgaagagacttgtttcatctccggaaatgcaaaaccatttatagcatgaagccctacatgatcactgcaggatgatcctcctcccatcctttccctttttaggtccctgtcttatacaaccagagaagtgggtgttggccaggcacatcccatctcaggcagcaagacaatctttcactcactgacggcagcagccatgtctctcaaagtggtgaaactaatatctgagcatcttttagacaagagaggcaaagacaaactggatttaatggcccaacatcaaagggtgaacccaggatatgaatttttgcatcttcccattgtcgaattagtctccagcctctaaataatgcccagtcttctccccaaagtcaagcaagagactagttgaagggagttctggggccaggctcactggaccattgtcacaaccctctgtttctctttgactaagtgccctggctacaggaattacacagttctctttctccaaagggcaagatctcatttcaatttctttattagagggccttattgatgtgttctaagtctttccagaaaaaaactatccagtgatttatatcctgatttcaaccagtcacttagctgataatcacagtaagaagacttctggtattatctctctatcagataagattttgttaatgtactattttactcttcaataaataaaacagtttattatctcaatcacaacattcctatatatcaaacactccttccatgacccagcctgattaccctgattaatgcaccaaaccaggtgtattaattgkcycctgctgcataaaatattactccaaaatttagtggctgaggacaacaaacatttattatctcatggtttttgtgggtcaggaatctaggagcagcttagctgggtgattctggttcacagtctctcatgtaactgcaatcaacatgtcagcctgggctgcagtaaccttaaggctcaactgaaagaggatctactttcaggctctctcacatcgctgttggcaagcctcagakctttgccacttgtgcctttccacggggcttccttatggacatggaagctggcttccccccatttaaagacatycaagaaagggcatgagattcggcacccaaaacagaagccacagtttgttgtttttgttgttgttgttttgnagatgggagaactggctttgtncacataggccggga

SEQ ID NO: 32 - DNA, 1835 bp, Homo sapiens
  misc feature (30): n equals a,t,g, or c
  misc feature (1801): n equals a,t,g, or c
ggcacagccaacgaggctccctggasccgnacgcagagcagcgccctggccgggccaagcaggagccggcatcatggattccttcaaagtagtgctggaggggccagcaccttggggcttccggctgcaaggggcaaggacttcaatgtgcccctctccatttcccggctcactcctgggggcaaagcggcgcaggccgkagtggccgtgggtgactgggtgctgagcatcgatggcgagaatgcgggtagcctcacacacatcgaagctcagaacaagatccgggcctgcggggagcgcctcagcctgggcctcagcagggcccagccggttcagagcaaaccgcagaaggccyccrccttaccctgcccgcccgccctgcccggctgtgtctctgcccaggcctccgcccccgccgcggaccctccgcggtacacctttgcacccagcgtctccctcaacaagacggcccggccctttggggcgcccccgcccgctgacagcgccccgcagcagaatggacagccgctccgaccgctggtcccagatgccagcaagcagcggctgatggagaacacagaggactggcggccgcggccggggacaggccagtcgcgttccttccgcatccttgcccacctcacaggcaccgagttcatgcaagacccggatgaggagcacctgaagaaatcaagccaggtgcccaggacagaagccccagccccagcctcatctacaccccaggagccctggcctggccctaccgcccccagccctaccagccgcccgccctgggctgtggaccctgcgtttgccgagcgctatgccccggacaaaacgagcacagtgctgacccggcacagccagccrgccacgcccacgccgctgcagagccgcacctccattgtgcaggcagctgccggaggggtgccaggagggggcagcaacaacggcaagactcccgtgtgtcaccagtgccacaaggtcatccggggccgctacctggtggcgctgggccacgcgtaccacccggaggagtttgtgtgtagccagtgtgggaaggtcctggaagagggtggcttctttgaggagaagggcgccatcttctgcccaccatgctatgacgtgcgctatgcacccagctgtgccaagtgcaagaagaagattacaggcgagatcatgcacgccctgaagatgacctggcacgtgcactgctttacctgtgctgcctgcaagacgcccatccggaacagggccttctacatggaggagggcgtgccctattgcgagcgagactatgagaagatgtttggcacgaaatgccatggctgtgacttcaagatcgacgctggggaccgcttcctggaggccctgggcttcagctggcatgacacctgcttcgtctgtgcgatatgtcagatcaacctggaaggaaagaccttctactccaagaaggacaggcctctctgcaagagccatgccttctctcatgtgtgagccccttctgcccacagctgccgcggtggcccctagcctgaggggcctggagtcgtggccctgcatttctgggtagggctggcaatggttgccttaaccctggctcctggcccgagcctggggctccctgggccctgccccacccaccttatcctcccaccccactccctccaccaccacagcacaccggtgctggccacaccagccccctttcacctccagtgccacaataaacctgtacccagctgaaaaaaaaaaaaaaaaaaaaaaaaaaaaaaaaaaaaaaagaaaaaaaaaaaaaaanaaaaaaaaaaaagaaaaaaaaaaaaaaggggggg

SEQ ID NO: 33 - DNA, 1299 bp, Homo sapiens
  misc feature (2): n equals a,t,g, or c
  misc feature (520): n equals a,t,g, or c
  misc feature (1287): n equals a,t,g, or c
  misc feature (1291): n equals a,t,g, or c
gntccccgccaccacagaccttcccccgccccacccctctgcagacttagccgtgcattgcaggcatggaggattaatcagtgacaggaagctgcgtctctcggagcggtgaccagctgtggtcaggagagcctcagcagggccagccccaggagtctttcccgattcttgctcactgctcacccacctgctgctgccatgaggcaccttggggccttcctcttccttctgggggtcctgggggccctcactgagatgtgtgaaataccagagatggacagccatctggtagagaagttgggccagcacctcttaccttggatggaccggctttccctggagcacttgaaccccagcatctatgtgggcctacgcctctccagtctgcaggctgggaccaaggaagacctctacctgcacagcctcaagcttggttaccagcagtgcctcctagggtctgccttcagcgaggatgacggtgactgccagggcaagccttccatgggccagctggcctctnacctgctcgctctcagagccaactgtgagtttgtcargggccacaagggggacargctggtctcacagctcaaatggttcctggaggatgagaagagagccattgggcatgatcacaagggccacccccacactagctactaccagtatggcctgggcattctggccctgtgtctccaccagaagcgggtccatgacagcgtggtggacaaacttctgtatgctgtggaacctttccaccagggccaccattctgtggacacagcagccatggcaggcttggcattcacctgtctgaagcgttcaaacttcaaccctggtcggagacacggatcaccatggccatcagaacagtgcgagaggagatcttgaaggcccagacccccgagggccactttgggaatgtctacagcaccccattggcattacagttcctcatgacttcccccatgcstggggcagaactgggaacagcatgtctcaaggcgarggttgctttgctggccagtctgcaggatggagccttccagaatgctctcatgatttcccagctgctgcccgttctgaaccacaagacctacattgatctgatcttcccagactgtctggcaccacgagtcatgttggaaccagctgctgagaccattcctcagacccaagagatcatcagtgtcacgctgcaggtgcttagtctcttgccgccgtacagacagtccactttgttctggccgggtccaccgtggaaratgtcctgaaraaggccatganttangggggttc

SEQ ID NO: 34 - DNA, 3340 bp, Homo sapiens
  misc feature (3194): n equals a,t,g, or c
  misc feature (3298): n equals a,t,g, or c
aattccttttttttttcaagtggaaccatggaggagagtggctgcccaaggtggggtttgtcttttgctgtctgagtggcccctgggatgcagggcgggtttctcaacggtgacttgtgggcagtgccttctgctgagcgagtcatggcccgaagcagaactaactgtgcctgcagtcttcactctcaggatgcagccgaggtgggcccaaggggccacgatgtggcttggagtcctgctgacccttctgctctgttcaagccttgagggtcaagaaaactctttcacaatcaacagtgttgacatgaagagcctgccggactggacggtgcaaaatgggaagaacctgaccctgcagtgcttcgcggatgtcagcaccacctctcacgtcaagcctcagcaccagatgctgttctataaggatgacgtgctgttttacaacatctcctccatgaagagcacagagagttattttattcctgaagtccggatctatgactcagggacatataaatgtactgtgattgtgaacaacaaagagaaaaccactgcagagtaccagctgttggtggaaggagtgcccagtcccagggtgacactggacaagaaagaggccatccaaggtgggatcgtgagggtcaactgttctgtcccagaggaaaaggccccaatacacttcacaattgaaaaacttgaactaaatgaaaaaatggtcaagctgaaaagagagaagaattctcgagaccagaattttgtgaatactggaattccccgttgaggaacaggaccgcgttttatccttccgatgtcaagctaggatcatttctgggatccatatgcagacctcagaatctaccaagagtgaactggtcaccgtgacggaatccttctctacacccaagttccacatcagccccaccggaatgatcatggaaggagctcagctccacattaagtgcaccattcaagtgactcacctggcccaggagtttccagaaatcataattcagaaggacaaggcgattgtggcccacaacagacatggcaacaaggctgtgtactcagtcatggccatggtggagcacagtggcaactacacgtgcaaagtggagtccagccgcatatccaaggtcagcagcatcgtggtcaacataacagaactattttccaagcccgaactggaatcttccttcacacatctggaccaaggtgaaagactgaacctgtcctgctccatcccaggagcacctccagccaacttcaccatccagaaggaagatacgattgtgtcacagactcaagatttcaccaagatagcctcaaagtcggacagtgggacgtatatctgcactgcaggtattgacaaagtggtcaagaaaagcaacacagtccagatagtcgtatgtraaatgctctcccagcccaggwtttcttatgatgcccagtttgaggtcataaaaggacagaccatcgaagtccgttgcgaatcgatcagtggaactttgcctatttcttaccaacttttaaaaacaagtaaagttttggagaatagtaccaagaactcaaatgatcctgcggtattcaaagacaaccccactgaagacgtcgaataccagtgtgttgcagataattgccattcccacgccaaaatgttaagtgaggttctgagggtgaaggtgatagccccggtggatgaggtccagatttctatcctgtcaagtaaggtggtggagtctggagaggacattgtgctgcaatgtgctgtgaatgaaggatctggtcccatcacctataagttttacagagaaaaagagggcaaacccttctatcaaatgacctcaaatgccacccaggcattttggaccaagcagaaggctagcaaggaacaggagggagagtattactgcacagccttcaacagagccaaccacgcctccagtgtccccagaagcaaaatactgacagtcagagtcattcttgccccatggaagaaaggacttattgcagtggttatcatcggagtgatcattgctctcttgatcattgcggccaaatgttattttctgaggaaagccaaggccaagcagatgccagtggaaatgtccaggccagcagtaccacttctgaactccaacaacgagaaaatgtcagatcccaatatggaagctaacagtcattacggtcacaatgacgatgtcagaaaccatgcaatgaaaccaataaatgataataaagagcctctgaactcagacgtgcagtacacggaagttcaagtgtcctcagctgagtctcacaaagatctaggaaagaaggacacagagacagtgtacagtgaagtccggaaagctgtccctgatgccgtggaaagcagatactctagaacggaaggctcccttgatggaacttagacagcaaggccagatgcacatccctggaaggacatccatgttccgagaagaacagatratccctgtatttcaagacctctgtgcacttatttatgaacctgccctgctcccacagaacacagcaattcctcaggctaagctgccggttcttaaatccatcctgctaagttaatgttgggtagaaagagatacagaggggctgttgaatttcccacataccctccttccaccaagttggaacatccttggaaattggaagagcacaagaggagatccagggcaaggccattgggatattctgaaacttgaatattttgttttgtgcagagataaagaccttttccatgcaccctcatacacagaaaccaattttcttttttatactcaatcatttctagcgcatggcctggttagaggctggttttttctcttttcctttggtccttcaaaggcttgtagttttggctagtccttgttctttggaaatacacagtgctgaccagacagcctccccctgtcccctctatgacctcgccctccacaaatgggaaaaccagactacttgggagcaccgcctgtgaaataccaacctgaagacaccgttcattcaggcaacgcacaaaacagaaaatgaaggtggaacaagcacagatgttcttcaactgtttttgtctacactctttctcttttcctctaccatgctgaaggctgaaagacaggaagatggtgccatcagcaaatattattcttaattgaaaacttgaaatgtgtatgtttcttactaantttttaaaatgtattccttgccagggcaggcaaggtggctcacgcctgtaatcccagcacttcaggaggctgaggtgggcggttcacctgaggtcaggagtttnagaccagcctgatgaaacccggtttctactaaaattaccaag

SEQ ID NO: 35 - DNA, 1490 bp, Homo sapiens
ccggacgcgtgggcggacgcgtgggcggaccgtgggtcgccgccacctccgcggaccctgagcgcaagagccaagccgccagcgctgctatgtgggccacgctgccgctgctctgcgccggggcctggctcctgggagtccccgtctgcggtgccgccgaactgtccgtgaactccttagagaagtttcacttcaagtcatggatgtctaagcaccgtaagacctacagtacggaggagtaccaccacaggctgcagacgtttgccagcaactggaggaagataaacgcccacaacaatgggaaccacacatttaaaatggcactgaaccaattttcagacatgagctttgctgaaataaaacacaagtatctctggtcagagcctcagaattgctcagccaccaaaagtaactaccttcgaggtactggtccctacccaccttccgtggactggcggaaaaaaggaaattttgtctcacctgtgaaaaatcagggtgcctgcggcagttgctggactttctccaccactggggccctggagtctgcgatcgccatcgcaaccggaaagatgctgtccttggcggaacagcagctggtggactgcgcccaggacttcaataatcacggctgccaagggggtctccccagccaggctttcgagtatatcctgtacaacaaggggatcatgggtgaagacacctacccctaccagggcaaggatggttattgcaagttccaacctggaaaggccatcggctttgtcaaggatgtagccaacatcacaatctatgacgaggaagcgatggtggaggctgtggccctctacaaccctgtgagctttgcctttgaggtgactcaggacttcatgatgtatagaacgggcatctactccagtacttcctgccataaaactccagataaagtaaaccatgcagtactggctgttgggtatggagaaaaaaatgggatcccttactggatcgtgaaaaactcttggggtccccagtggggaatgaacgggtacttcctcatcgagcgcggaaagaacatgtgtggcctggctgcctgcgcctcctaccccatccctctggtgtgagccgtggcagccgcagcgcagactggcggagaaggagaggaacgggcagcctgggcctgggtggaaatcctgccctggaggaagttgtggggagatccactgggacccccaacattctgccctcacctctgtgcccagcctggaaacctacagacaaggaggagttccaccatgagctcacccgtgtctatgacgcaaagatcaccagccatgtgccttagtgtccttcttaacagactcaaaccacatggaccacgaatattctttctgtccagaagggctactttccacatatagagctccagggactgtcttttctgtattcgctgttcaataaacattgagtgagcacctccccaraaaaaaaaaaaaaaaaaaaaaaaaaaaaaaaaa

SEQ ID NO: 36 - DNA, 2855 bp, Homo sapiens
  misc feature (1164): n equals a,t,g, or c
gtcgacccacgcgtccgcccacgcgtccgctgctactcagagttgcaacctcagcctcgctatggctcccagcagcccccggcccgcgctgcccgcactcctggtcctgctcggggctctgttcccaggacctggcaatgcccagacatctgtgtccccctcaaaagtcatcctgccccggggaggctccgtgctggtgacatgcagcacctcctgtgaccagcccaagttgttgggcatagagaccccgttgcctaaaaaggagttgctcctgcctgggaacaaccggaaggtgtatgaactgagcaatgtgcaagaagatagccaaccaatgtgctattcaaactgccctgatgggcagtcaacagctaaaaccttcctcaccgtgtactggactccagaacgggtggaactggcacccctcccctcttggcagccagtgggcaagaaccttaccctacgctgccaggtggagggtggggcaccccgggccaacctcaccgtggtgctgctccgtggggagaaggagctgaaacgggagccagctgtgggggagcccgctgaggtcacgaccacggtgctggtgaggagagatcaccatggagccaatttctcgtgccgcactgaactggacctgcggccccaagggctggagctgtttgagaacacctcggccccctaccagctccagacctttgtcctgccagcgactcccccacaacttgtcagcccccgggtcctagaggtggacacgcaggggaccgtggtctgttccctggacgggctgttcccagtctyggaggcccaggtccamctggcactgggggaccagaggttgaaccccacagtcacctatggcaacgactccttctcggccaaggcctcagtcagtgtgaccgcagaggacgagggcacccagcggctgacgtgtgcagtaatactggggaaccagagccaggagacactgcagacagtgaccatctacagctttccggcgcccaacgtgattctgacgaagccagaggtctcagaagggaccgaggtgacagtgaagtgtgaggcccaccctagagccaaggtgacgctgaatggggttccagcccagccactgggcccgagggccagctgcctgctgaaggccaccccagaggacaacgggcgcanttctcctgctctgcaaccctggaggtggccggccagcttatacacaagaaccagacccgggagcttcgtgtcctgtatggcccccgactggacgagagggattgtccgggaaactggacgtggccagaaaattcccagcagactccaatgtgccaggcttgggggaacccattgcccgagctcaagtgtctaaaggatggcactttcccactgcccatcggggaatcagtgactgtcactcgagatcttgagggcacctacctctgtcgggccaggagcactcaaggggaggtcacccgcaaggtgaccgtgaatgtgctctccccccggtatgagattgtcatcatcactgtggtagcagccgcagtcataatgggcactgcaggcctcagcacgtacctctataaccgccagcggaagatcaagaaatacagactacaacaggcccaaaaagggacccccatgaaaccgaacacacaagccacgcctccctgaacctatcccgggacagggcctcttcctcggccttcccatattggtggcagtggtgccacactgaacagagtggaagacatatgccatgcagctacacctaccggccctgggacgccggaggacagggcattgtcctcagtcagatacaacagcatttggggccatggtacctgcacacctaaaacactaggccacgcatctgatctgtagtcacatgactaagccaagaggaaggagcaagactcaagacatgattgatggatgttaaagtctagcctgatgagaggggaagtggtgggggagacatagccccaccatgaggacatacaactgggaaatactgaaacttgctgcctattgggtatgctgaggccccacagacttacagaagaagtggccctccatagacatgtgtagcatcaaaacacaaaggcccacacttcctgacggatgccagcttgggcactgctgtctactgaccccaacccttgatgatatgtatttattcatttgttattttaccagctatttattgagtgtcttttatgtaggctaaatgaacataggtctctggcctcacggagctcccagtcctaatcacattcaaggtcaccaggtacagttgtacaggttgtacactgcaggagagtgcctggcaaaaagatcaaatggggctgggacttctcattggccaacctgcctttccccagaaggagtgatttttctatcggcacaaaagcactatatggactggtaatggttacaggttcagagattacccagtgaggccttattcctcccttccccccaaaactgacacctttgttagccacctccccacccacatacatttctgccagtgttcacaatgacactcagcggtcatgtctggacatgagtgcccagggaatatgcccaagctatgccttgtcctcttgtcctgtttgcatttcactgggagcttgcactatgcagctccagtttcctgcagtgatcagggtcctgcaagcagtggggaagggggccaaggtattggaggactccctcccagctttggaagcctcatccgcgtgtgtgtgtgtgtgtatgtgtagacaagctctcgctctgtcacccaggctggagtgcagtggtgcaatcatggttcactgcagtcttgaccttttgggsttcaagtgatcctcccacctcagcct

SEQ ID NO: 37 - DNA, 990 bp, Homo sapiens
  misc feature (976): n equals a,t,g, or c
  misc feature (990): n equals a,t,g, or c
gcagaaggggacaagtctaggaggtctctgaggttactgtacccatccctccttcatctccctccagcatttgtttctggaaggagtcaacaccaacagctctgacctgggcagccttcctgagaaaatgcagccattcctcctcctgttggcctttcttctgacccctggggctgggacagaggagatcatcgggggccatgaggccaagccccactcccgcccctacatggcctttgttcagtttctgcaagagaagagtcggaagaggtgtggcggcatcctagtgagaaaggactttgtgctgacagctgctcactgccagggaagctccataaatgtcaccttgggggcccacaatatcaaggaacaggagcggacccagcagtttatccctgtraaaagacccatcccccatccagcctataatcctaagaacttctccaacgacatcatgctactgcagctggagagaaaggccaagtggaccacagctgtgcggcctctcaggctacctagcagcaaggcccaggtgaagccagggcagctgtgcagtgtggctggctggggttatgtctcaatgagcactttagcaaccacactgcaggaagtgttgctgacagtgcagaaggactgccagtgtgaacgtctcttccatggcaattacagcagagccactgagatttgtgtgggggatccaaagaagacacagaccggtttcaarggggactccggggggcccctcgtgtgtaaggacgtagcccaaggtattctctcctatggaaacaaaaaagggacaccyccaggagtctacatcaaggtctcacacttcctgccctggataaagagaacaatgaagcgcctctaacagcaggcatgagactaaccttcctctgggcctgaccatytctgggacagaggcaagaatycccaaggggtgggcagtcggggttgcaggaytktawtaatggttttntggtgttaaaaaan

SEQ ID NO: 38 - DNA, 433 bp, Homo sapiens
  misc feature (425): n equals a,t,g, or c
cccgggtcgaccacgcgtccggactcagagacggaaccagagacaggccagagcatccccctcctccaccatgaaactcgctgtcaccctcaccctggtcacactggctctctgctgcagctccgcttctgcagagatctgcccgagctttcagcgtggtcatcgaaaccctcctcatggacacaccctccagttatgaggctgccatggaacttttcagccctgatcaagacatgagggaggcaggggctcagctgaagaagctggtggacaccctcccccaaaagcccagagaaagcatcattaagstcatgggaaaaaatagcccaaagctcactgtgttaattaggcattttaggaagcttgaagatcccccaactggttccagcctcttgccgttgccatggtttttggagttccacggnccaccagc

SEQ ID NO: 39 - DNA, 926 bp, Homo sapiens
  misc feature (8): n equals a,t,g, or c
  misc feature (900): n equals a,t,g, or c
  misc feature (920): n equals a,t,g, or c
ttcaaaantcagtttaggtgacactatagaaggtacgcctgcasgtaccgktccggaattcccgggtcgacccacgcgtccgagagcatagcacctgcagcaagatggatgtgggcagcaaagaggtcctgatggagagcccgccggactactccgcagctccccggggccgatttggcattccctgctgcccagtgcacctgaaacgccttcttatcgtggtggtggtggtggtcctcatcgtcgtggtgattgtgggagccctgctcatgggtctccacatgagccagaaacacacggagatggttctggagatgagcattggggcgccggaagcccagcaacgcctggccctgagtgagcacctggttaccactgccaccttctccatcggctccactggcctcgtggtgtatgactaccagcagctgctgatcgcctacaagccagcccctggcacctgctgctacatcatgaagatagctccagagagcatccccagtcttgaggctctcactagaaaagtccacaacttccaggccaagcccgcagtgcctacgtctaagctgggccaggcagaggggcgagatgcaggctcagcaccctccggaggggacccggccttcctgggcatggccgtgagcaccctgtgtggcgaggtgccgctctactacatctaggacgcctccgggtcagtggaagccccaacgggaaaggaaacgccccgggcaaagggtcttttgcagcttttgcagacgggcaagaagctgcttctgcccacaccgcaggacaarccctggagaaatgggagcttggggagaggatgggagtgggcagaggtggccccaggggcccgggaactcctgccacaacagaataaagcagcctgattgaaaagcnaaaaaaaaaaaaaaaaaatngccccc

SEQ ID NO: 40 - DNA, 406 bp, Homo sapiens
  misc feature (318): n equals a,t,g, or c
  misc feature (396): n equals a,t,g, or c
  misc feature (400): n equals a,t,g, or c
caacagggaaaccagctaaggatctcaggagatgacggctgacctgagtcctgaaggattcatgctaggagtggaaggcattcttcttaggctacttgggtatcaggagacccagccctttccctgtgaatatttgattttacttcttgtgagtgttcagctcctgcttaacaacaggcaacatgaagagtgagattggaggtgagaaggtacttatctgctgcttgtgagcaagggaataagttgagagccaagagcagcctgagcatctttgtcctgacgatgggstaaggttcccagcccytcytcccgaggaanccgaatgtkaagggaactgaaagacgcacctgccaagcctgaaagtctccgtcatccaagggccaccaacaacggcancatnccctta

SEQ ID NO: 41 - DNA, 1501 bp, Homo sapiens
  misc feature (5): n equals a,t,g, or c
  misc feature (14): n equals a,t,g, or c
  misc feature (28): n equals a,t,g, or c
  misc feature (996): n equals a,t,g, or c
  misc feature (1488): n equals a,t,g, or c
  misc feature (1495): n equals a,t,g, or c
  misc feature (1498): n equals a,t,g, or c
atggntcccccggntgcagattcgcacnggggaataaaggctcagggaccggcagttctactctagagcccaccagcctctcagagcctccggtgactggcctgtgtctccccctggatggacatgtggacggcgctgctcatcctgcaagccttgttgctaccctccctggctgatggtgccacccctgccctgcgctttgtagccgtgggtgactggggaggggtccccaatgccccattccacacggcccgggaaatggccaatgccaaggagatcgctcggactgtgcagatcctgggtgcagacttcatcctgtctctaggggacaatttttacttcactggtgtgcaagacatcaatgacaagaggttccaggagacctttgaggacgtattctctgaccgctcccttcgcaaagtgccctggtacgtgctagccggaaaccatgaccaccttggcaatgtctctgcccagattgcatactctaagatctccaagcgctggaacttccccagccctttctaccgcctgcacttcaagatcccacagaccaatgtgtctgtggccatttttatgctggacacagtgacactatgtggcaactcagatgacttcctcagccagcagcctgagaggccccgagacgtgaagctggcccgcacacagctgtcctggctcaagaaacagctggcggcggccaggraggactacgtgctggtggctggccactaccccgtgtggtccatagccgagcacgggcctacccactgcctggtcaagcagctacggccactgctggccacatacggggtcactgcctacctgtgcggccacgatcacaatctgcagtacctgcaagatgagaatggcgtgggctacgtgctgagtggggctgggaatttcatggacccctcaaagcggcaccagcgcaaggtccccaacggctatctgcgcttccactatgggactgaagactcactgggtggctttgcntatgtggagatcagctccaaagagatgactgtcacttacatcgaggcctcgggcaagtccctctttaagaccaggctgccgaggcgagccaggccctgaactcccatgactgcccagctctgaggcccgatctccactgttgggtgggtgggccctgccgggaccctgctcacaggcaggcttttcctccaacctgtggcgctgcagcagggcaggaaggggaaacacagctgatgaactgtggtgccacatgacccttgtggcacagatgcccacgtatgtgaaacacacatggacatgtgtcccagccacagtgttatgctctgtggctggctcacctttgctgagttccggggtgcaatgggggagggagggagggaaagcttcctcctaaatcaagcatctttctgttactgatgttcaataaaagaatagttgccaaggctgaaaaaaaaaaaaaaaaaacycgrgggggggcccggwacccaattngccctanagngag

SEQ ID NO: 42 - DNA, 1574 bp, Homo sapiens
  misc feature (1029): n equals a,t,g, or c
  misc feature (1076): n equals a,t,g, or c
  misc feature (1574): n equals a,t,g, or c
aattcggcacgagaatccttcctgttacggtccccctccctgaaacatccttcattgcaatatttccaggaaaggaagggggctggctcggaggaagagaggtggggaggtgatcagggttcacagaggagggaactgaatgacatcccaggattacataaactgtcagaggcagccgaagagttcacaagtgtgaagcctggaagccggcgggtgccgctgtgtaggaaagaagctaaagcacttccagagcctgtccggagctcagaggttcggaagacttatcgaccatggagcgcgcgtcctgcttgttgctgctgctgctgccgctggtgcacgtctctgcgaccacgccagaaccttgtgagctggacgatgaagatttccgctgcgtctgcaacttctccgaacctcagcccgactggtccgaagccttccagtgtgtgtctgcagtagaggtggagatccatgccggcggtctcaacctagagccgtttctaaagcgcgtcgatgcggacgccgacccgcggcagtatgctgacacggtcaaggctctccgcgtgcggcggctcacagtgggagccgcacaggttcctgctcagctactggtaggcgccctgcgtgtgctagcgtactcccgcctcaaggaactgacgctcgaggacctaaagataaccggcaccatgcctccgctgcctctggaagccacaggacttgcactttccagcttgcgcctacgcaacgtgtcgtgggcgacagggcgttcttggctcgccgagctgcagcagtggctcaagccaggcctcaaggtactgagcattgcccaagcacactcgcctgccttttcctgcgaacaggttcgcgccttcccggcccttaccagcctagacctgtctgacaatcctggactgggcgaacgcggactgatggcggctctctgtccccacaagttcccggccatccagaatctagcgctgcgcaacacaggaatggagacgcccacaggygtgtgcgccgcactggcggsgncaggtgtgcagccccacagcctagacctcagccacaactcgctgcgngccaccgtaaaccctagcgctccgagatgcatgtggtccagcgccctgaactccctcaatctgtcgttcgctgggctggaacaggtgcctaaaggactgccagccaagctcagagtgctcgatctcagctgcaacagactgaacagggcgccgcagcctgacgagctgcccgaggtggataacctgacactggacgggaatcccttcctggtccctggaactgccctcccccacgagggctcaatgaactccggcgtggtcccagcctgtgcacgttcgaccctgtcggtgggggtgtcgggaaccctggtgctgctccaaggggcccgggctttgcctaagatccaagacagaataatgaatggactcaaactgccttggcttcaggggagtcccgtcaggacgttgaggacttttcgaccaattcaaccctttgccccacctttattaaaatcttaaacaacgaaaaaaaaaaaaaaaaaaaaaaaaaaaaaaacn

SEQ ID NO: 43 - DNA, 2196 bp, Homo sapiens
ggcacgaggaaacacagagctttagctccgccaaaatgaaacactcattaaacgcacttctcattttcctcatcataacatctgcgtggggtgggagcaaaggcccgctggatcagctagagaaaggaggggaaactgctcagtctgcagatccccagtgggagcagttaaataacaaaaacctgagcatgcctcttctccctgccgacttccacaaggaaaacaccgtcaccaacgactggattccagagggggaggaggacgacgactatctggacctggagaagatattcagtgaagacgacgactacatcgacatcgtcgacagtctgtcagtttccccgacagactctgatgtgagtgctgggaacatcctccagctttttcatggcaagagccggatccagcgtcttaacatcctcaacgccaagttcgstttcaacctctaccgagtgctgaaagaccaggtcaacactttcgataacatcttcatagcacccgttggcatttctactgcgatgggtatgatttccttaggtctgaagggagagacccatgaacaagtgcactcgattttgcattttaaagactttgttaatgccagcagcaagtatgaaatcacgaccattcataatctcttccgtaagctgactcatcgcctcttcaggaggaattttgggtacacactgcggtcagtcaatgacctttatatccagaagcagtttccaatcctgcttgacttcaaaactaaagtaagagagtattactttgctgaggcccagatagctgacttctcagaccctgccttcatatcaaaaaccaacaaccacatcatgaagctcaccaagggcctcataaaagatgctctggagaatatagaccctgctacccagatgatgattctcaactgcatctacttcaaaggatcctgggtgaataaattcccagtggaaatgacacacaaccacaacttccggctgaatgagagagaggtagttaaggtttccatgatgcagaccaaggggaacttcctcgcagcaaatgaccaggagctggactgcgacatcctccagctggaatacgtggggggcatcagcatgctaattgtggtcccacacaagatgtctgggatgaagaccctcgaagcgcaactgacaccccgggtggtggagagatggcaaaaaagcatgacaaacagaactcgagaagtgcttctgccgaaattcaagctggagaagaactacaatctagtggagtccctgaagttgatggggatcaggatgctgtttgacaaaaatggcaacatggcaggcatctcagaccaaaggatcgccatcgacctgttcaagcaccaaggcacgatcacagtgaacgaggaaggcacccaagccaccactgtgaccacggtggggttcatgccgctgtccacccaagtccgcttcactgtcgaccgcccctttcttttcctcatctacgagcaycgcaccagctgcctgctcttcatgggaagagtggccaaccccagcaggtcctagaggtggaggtctaggtgtctgaagtgccttgggggcacctcattttgtttccattccaacaacgagaacagagatgttctggcatcatttacgtagtttacgctaccaatctgaattcgaggcccatatgagaggagcttagaaacgaccaagaagagaggcttgttggaatcaattctgcacaatagcccatgctgtaagctcatagaagtcactgtaactgtagtgtgtctgctgttacctagagggtctcacctccccactcttcacagcaaacctgagcagcgcgtcctaagcacctcccgctccggtgaccccatccttgcacacctgactctgtcactcaagcctttctccacccaggcccctcatctgaataccaagcacagaaatgagtggtgtgactaattccttacctctcccaaggagggtacacaactagcaccattcttgatgtccagggaagaagccacctcaagacatatgaggggtgccctgggctaatgttagggcttaattttctcaaagcctgacctttcaaatccatgatgaatgccatcagtccctcctgctgttgcctccctgtgacctggaggacagtgtgtgccatgtctcccatactagagataaataaatgtagccacatttactgtgaawaaaa

SEQ ID NO: 44 - DNA, 3785 bp, Homo sapiens
  misc feature (3): n equals a,t,g, or c
gancggacgccttcytcgacccgaggccgctgaccgtcgtggccgtggcaacgttcatgagtgccgtgtgtttcggctgccgctacagcmacgacgaccccgagttccgtgagctgctcagccacaacgaagagttcgggcgcacggtgggcgcgggcagcctggtggacgtgatgccctggctgcagtacttccccaacccggtgcgcaccgttttccgcgaattcgagcagctcaaccgcaacttcagcaacttcatcctggacaagttcttgaggcactgcgaaagccttcggcccggggccgccccccgcgacatgatggacgcctttatcctctctgcggaaaaraargcggccggggactcrcacggtggtggcgcgcggctggatttggaraacgtaccggccactatcactgacatcttcggcgccagcaggacaccctgtccaccgcgctgcagtggctgctcctcctcttcaccaggtatcctgatgtgcagactcgagtgcaggcagaattggatcaggtcgtggggagggaccgtctgccttgtatgggtgaccagcccaacctgccctatgtcctggccttcctttatgaagccatgcgcttctccagctttgtgcctgtcactattcctcatgccaccactgccaacacctctgtcttgggctaccacattcccaaggacactgtggtttttgtcaaccagtggtctgtgaatcatgacccastgaagtggcctaacccggagaactttgatccagctcgattcttggacaaggayggcctcatcaacaaggacctgaccagcagagtgatgattttttcagtgggcaaaaggcggtgcattggcgaagaactttctaagatgcagctttttctcttcatctccatcctggctcaccagtgcgatttcagggccaacccaaatgagcctgcgaaaatgaatttcagttatggtctaaccattaaacccaagtgcatttaaagtgcaatgtcactctcagagagtccatgggagctccttgatagtgctgtccaaaatttacaagccaaggaaacttgccaataagaagcaagaggcaagctgaaattttagaaatattcacatcttcggagatgaggagtaaaattcagtttttttccagttcctcttttgtgctgcttctcaattagcgtttaaggtgagcataaatcaactgtccatcaggtgaggtgtgctccatacccagcggttcttcatgagtagtgggctatgcaggagcttctgggagatttttttgagtcaaagacttaaagggcccaatgaattattatatacatactgcatcttggttatttctgaaggtagcattctttggagttaaaatgcacatatagacacatacacccaaacacttacaccaaactactgaatgaagaagtattttggtaaccaggccatttttggtgggaatccaagattggtctcccatatgcagaaatagacaaaaagtatattaaacaaagtttcagagtatattgttgaagagacagagacaagtaatttcagtgtaaagtgtgtgattgaaggtgataagggaaaagataaagaccagaaattcccttttcaccttttcaggaaaataacttagactctagtatttatgggtggatttatccttttgccttctggtatacttccttacttttaaggataaatcataaagtcagttgctcaaaaagaaatcaatagttgaattagtgagtatagtggggttccatgatttatcatgaattttaaagtatgcattattaaattgtaaaactccaaggtgatgttgtacctcttttgcttgccaaagtacagaatttgaattatcagcaaaraaaaaaaaaaaagccagccaagctttaaattatgtgaccataatgtactgatttcagtaagtctcataggttaaaaaaaaaagtcaccaaatagtgtgaaatatattacttaactgtccgtaagcagtatattagtattatcttgttcaggaaaaggttgaataatatatgccttgtrtaatattgaaaattgaaaagtacaactaacgcaaccaagtgtgctaaaaatgagcttgattaaatcaaccacctatttttgacatggaaatgaagcagggtttcttttcttcactcaaattttggcgaatctcaaaattagatcctaagatgtgttcttatttttataacatctttattgaaattctatttataatacagaatcttgttttgaaaataacctaattaatatattaaaattccaaattcatggcatgcttaaattttaactaaattttaaagccattctgattattgagttccagttgaagttagtggaaatctgaacattctcctgtggaaggcagagaaatctaagctgtgtctgcccaatgaataatggaaaatgccatgaattacctggatgttctttttacgaggtgacaagagttggggacagaactcccattacaactgaccaagtttctcttctagatgattttttgaaagttaacattaatgcctgctttttggaaagtcagaatcagaagatagtcttggaagctgtttggaaaagacagtggagatgaggtcagttgtgttttttaagatggcaattactttggtagctgggaaagcataaagctcaaatgaaatgtatgcattcacatttagaaaagtgaattgaagtttcaagttttaaagttcattgcaattaaacttccaaagaaagttctacagtgtcctaagtgctaagtgcttattacattttattaagctttttggaatctttgtaccaaaattttaaaaaagggagtttttgatagttgtgtgtatgtgtgtgtggggtggggggatggtaagagaaaagagagaaacactgaaaagaaggaaagatggttaaacattttcccactcattctgaattaattaatttggagcacaaaattcaaagcatggacatttagaagaaagatgtttggcgtacagagttaaatctcaaataggctattaaaaaagtctacaacatagcagatctgttttgtggtttggaatattaaaaaacttcatgtaattttattttaaaatttcatagctgtacttcttgaatataaaaaatcatgccagtatttttaaaggcattagagtcaactacacaaagcaggcttgcccagtacatttaaattttttggcacttgccattccaaaatattatgccccaccaaggctgagacagtgaatttgggctgctgtagcctatttttttagattgagaaatgtgtagctgcaaaaataatcatgaaccaatctggatgcctcattatgtcaaccaggtccagatgtgctataatctgtttttacgtatgtaggcccagtcgtcatcagatgcttgcggcaaaaggaaagctgtgtttatatggaagaaagtaaggtgcttggagtttacctggcttatttaatatgcttataacctagttaaagaaaggaaaagaaaacaaaaaacgaatgaaaataactgaatttggaggctggagtaatcagattactgctttaatcagaaaccctcattgtgtttctaccggagagagaatgtatttgctgacaaccattaaagtcagaagttttactccaggttattgcaataaagtataatgtttattaaatgcttcatttgtatgtcaagctttgactctataagcaattgcytttttccaaaacagtggaatttgggctgctgtagcctatttttttag

SEQ ID NO: 45 - DNA, 480 bp, Homo sapiens
caagatgcaagcaccagccttcagggacaagaaacagggggtctcagccaagaatcaaggtgcccatgacccagactatgagaatatcaccttggccttcaaaaatcaggaccatgcaaagggtggtcattcacgacccacgagccaagtcccagcccagtgcaggccgccctcagactccacccaggtcccctgctggttgtacagagccatcctgagcctgtacatcctcctggccctggcctttgtcctctgcatcatcctgtcagccttcatcatggtgaagaatgctgagatgtccaaggagctgctgggctttaaaagggagctttggaatgtctcaaactccgtacaagcatgcgaagagagacagaagagaggctgggawtccgttcagcagagcatcaccatggtcaggagcaagattgatagattagagacgacattagcaggcataaaaaacattgacacaaaggtaca

SEQ ID NO: 46 - DNA, 1010 bp, Homo sapiens
  misc feature (844): n equals a,t,g, or c
gagagagagagagagagagagagagagagaggtgttccaggagccgaatcagaaatgtcatcctcaggcacgccagacttacctgtcctactcaccgatttgaagattcaatatactaagatcttcataaacaatgaatggcatgattcagtgagtggcaagaaatttcctgtctttaatcctgcaactgaggaggagctctgccaggtagaagaaggagataaggaggatgttgacaaggcagtgaaggccgcaagacaggcttttcagattggatcyccgtggcgtactatggatgcttccgagagggggcgactattatacaagttggctgatttaatcgaaagagatcgtctgctgctggcgacaatggagtcaatgaatggtggaaaactctattccaatgcatatctgaatgatttagcaggctgcatcaaaacattgcgctactgtgcaggttgggctgacaagatccagggccgtacaataccaattgatggaaatttttttacatatacaagacatgaacctattggtgtatgtggccaaatcattccttggaatttcccgttggttatgctcatttggaagatagggcctgcactgagctgtggaaacacagtgggttgtcaaaccagcagagcaaactcctctcactgctctccacgtggcatctttaataaaagaggcagggtttcctcctggagtagtgaatattgttcctggttatgggcctacagcaggggcagccatttyttctcacatggatatagacaaagtagccttcacaggrtcaacagaggttggcaagttgatcaaagaagctgccgggaaaagcaatctngaagagggtgaccctggagctttgraggaaagagcccttgcattgtgktagctgatgccgattggacaatgctgttgratttkcacacctggggtattytaccaccagggccaktttgtwtaccgcaccaggttttttttgggagraycatttatgatgagttgtc

SEQ ID NO: 47 - DNA, 3773 bp, Homo sapiens
ccttatactgatgttgctggtcgctttggcagagtggaagaggaagctgcccagaagaacatggccctcaagaagatccgggagctggaatctcagatctctgaactccaggaagacctggagtctgagcgtgcttccaggaataaagctgagaagcagaaacgggaccttggggaagagctagaggcgctgaaaacagagttggaggacacgctggattccacagctgcccagcaggagctcaggtcaaaacgtgagcaggaggtgaacatcctgaagaagaccctggaggaggaggccaagacccacgaggcccagatccaggagatgaggcagaagcactcacaggccgtggaggagctggcggacagctggagcagacgaagcgggtgaaagcaaacctcgagaaggcaaagcagactctggagaacgagcggggggagctggccaacgaggtgaaggtgctgctgcagggcaaaggggactcggagcacaagcgcaagaaaktggaggcgcagytgcaggagctgcaggtcaagttcaacgagggagagcgcgtgcgcacagagctggccgacaaggtcaccaagctgcaggtggagctggacaacgtgaccgggcttctcagccagtccgacagcaagtccagcaagctcaccaaggacttctccgcgctggagtcccagctgcaggacactcaggagctgctgcaggaggagaaccggcagaagctgagcctgagcaccaagctcaagcaggtggaggacgagaagaattccttccgggagcagctggaggaggaggaggaggccaagcacaacctggagaagcagatcgccaccctccatgcccaggtggccgacatgaaaaagaagatggaggacagtgtggggtgcctggaaactgctgaggaggtgaagaggaagctccagaaggacctggagggcctgagccagcggcacgaggagaaggtggccgcctacgacaagctggagaagaccaagacgcggctgcagcaggagctggacgacctgctggtggacctggaccaccagcgccagagcgcgtgcaacctggagaagaagcagaagaagtttgaccagctcctggcggaggagaagaccatctctgccaagtatgcagaggagcgcgaccgggctgaggcggaggcccgagagaaggagaccaaggctctgtcgctggcccgggccctggaggaagccatggagcagaaggcgkaytggtagcgkctcaacaagcagttccgcacggagatggaggaccttatgagctccaaggatgatgtgggcaagagtgtccacgagctggagaagtccaagcgggccctagagcagcaggtggaggagatgaagacgcagctggaagagctggaggacgagctgcakgccaccgaagatgccaagctgcggttggaggtcaacctgcaggccatgaaggcccagttcgagcgggacctgcagggccgggacgagcagagcgaggagaagaagaagcagctggtcagacaggtgcgggagatggaggcagagctggaggacgagaggaagcagcgctcgatggcagtggccgcccggaagaagctggagatggacctgaaggacctggaggcgcacatcgactcggccaacaagaaccgggacgaagccatcaaacagctgcggaagctgcaggcccagatgaaggactgcatgcgcgagctggatgacacccgcgcctctcgtgaggagatcctggcccaggccaaagagaacgagaagaagctgaagagcatggaggccgagatgatccagttgcaggaggaactggcagccgcggagtgccaagcgccaggcccagcaggagcgggatgagctggctgacgagatcgccaacagcagcggcaaaggagccctggckttagaggagaagcggcgtctggaggcccgcatcgcccagctggaggaggagctggaggaggagcagggcaacacggagctgatcaacgaccggctgaagaaggccaacctgcagatcgaccagatcaacaccgacctgaacctggagcgcascacgcccagaagaacgagaatgctcggcagcagctggaacgccagaacaaggagcttaaggtcaagctgcaggagatggagggcactgtcaagtccaagtacaaggcctccatcaccgccctcgaggccaagattgcacagctggaggagcagctggacaacgagaccaaggagcgccaggcagcctgcaaacaggtgcgtcggaccgagaagaagctgaaggatgtgctgctgcaggtggatgacgagcggaggaacgccgagcagtacaaggaccaggccgacaaggcatctacccgcctgaagcagctcaagcggcagctggaggaggccgaagaggaggcccagcgggccaacgsctcccgccggaaactgcagcgcgagctggaggacgccactgagacggccgatgccatgaaccgcgaagtcagctccctaaagaacaagctcaggcgcggggacctgccgtttgtcgtgccccgccgaatggcccggaaaggcgccggggatggctccgacgaagaggtagatggcaaagcggatggggctgaggccaaacctgccgaataagcctcttctcctgcagcctgagatggatggacagacagacaccacagcctccccttcccagaccccgcagcacgcctctccccaccttcttgggactgctgtgaacatgcctcctcctgccctccgccccgtccccccatcccgtttccctccaggtgttgttgagggcatttggcttcctctgctgcatccccttccagctccctcccctgctcagaatctgataccaaagagacagggcccgggcccaggcagagagcgaccagcaggctcctcagccctctcttgccaaaaagcacaagatgttgaggcgagcagggcaggcccccggggaggggccagagttttctatgaatctatttttcttcagactgaggccttttggtagtcggagcccccgcagtcgtcagcctccctgacgtctgccaccagcgcccccactcctcctcctttctttgctgtttgcaatcacacgtggtgacctcacacacctctgccccttgggcctcccactcccatggctctgggcggtccagaaggagcaggccctgggcctccacctctgtgcagggcacagaaggctggggtggggggargagtggattcctccccaccctgtcccaggcagcgccactgtccgctgtctccctcctgattctaaaatgtctcaagtgcaatgccccctcccctcctttaccgaggacagcctgcctctgccacagcaaggctgtcggggtcaagctggaaaggccagcagccttccagtggcttctcccaacactcttggggaccaaatatatttaatggttaagggacttgtcccaagtctgacagccagagcgttagaggggccagcggcctcccaggcgatcttgtgtctactctaggactgggcccgagggtggtttacctgcaccgttgactcagtatagtttaaaaatctgccacctgcacaggtatttttgaaagcaaaataaggttttcttttttcccctttcttgtaataaatgataaaattccgagtctttctcamtgcctttgtttagaagagagtagctcgtcctcamtggtctacactggktgccgaatttacttgtawtcctaactgktttgkawawgctgcattgagactta

SEQ ID NO: 48 - DNA, 1462 bp, Homo sapiens
  misc feature (952): n equals a,t,g, or c
  misc feature (1391): n equals a,t,g, or c
  misc feature (1458): n equals a,t,g, or c
gggcagagcggcggctccgggtttggcaacgaggacgggggagtgcgactgcgtctcgggcagcatggccgagaagcggcacacacgggactccgaagcccagcggctccccgactccttcaaggacagccccagtaagggccttggaccttgcggatggattttggtggcgttctcattcttattcaccgttataactttcccaatctcaatatggatgtgcataaagattataaaagagtatgaaagagccatcatctttagattgggtcgcattttacaaggaggagccaaaggacctggtttgttttttattctgccatgcactgacagcttcatcaaagtggacatgagaactatttcatttgatattcctcctcaggagatcctcacaaaggattcagtgacaattagcgtggatggtgtggtctattaccgcgttcagaatgcaaccctggctgtggcaaatatcaccaacgctgactcagcaacccgtcttttggcacaaactactctgaggaatgttctgggcaccaagaatctttctcagatcctctctgacagagaagaaattgcacacaacatgcagtctactctggatgatgccactgatgcctggggaataaaggtggagcgtgtggaaattaaggatgtgaaactacctgtgcagctccagagagctatggctgcagaagcagaagcgtcccgcgaggcccgcgccaaggttattgcagccgaaggagaaatgaatgcatccagggctctgaaagaagcctccatggtcatcactgaatctcctgcagcccttcagctccgatacctgcagacactgaccaccattgctgctgagaaaaactcaacaattgtcttccctctgcccatagatatgctgcaaggaatcataggggcaaaacacagccatctaggctagtgtagagatgagcgctagctntccaagcatgaagtcggggaccaaattagcctttaactcataaagagagggtagggcttttctttttccatatgtcaattgtggtgttcccagaatgtatagcagttataaaaataggtgaaagaattgttagcttgtaaatactgagagattggtgatttatataaggtaatctgttagtcttaaaatagttaaaagtttgtatttttagattattatgtagtaggttagatccctcttgttttgacttccactgactcattctgaaccccctaagcacccaggccagaggcaagaacctgggctgtaactgccacctgacaccgctgactggctaaatgctttgcagaaagtgatgaccttacaccacaaccagcttctccaggtcatatgtgccttacctccagagagtctttttttttttttttcygrgakgggntttcacycttgttgcccaggctgggagtgcaatagcatgattcttcgggctcactggcaacctccgnctcc

SEQ ID NO: 49 - DNA, 561 bp, Homo sapiens
ggcgagcggccgctcgcgatctagaacgaagactgagcggttgtggccgcgttgccgacctccagcagcagtcggcttctctacgcagaacccgggagtaggagactcagaatcgaatctcttctccctccccttcttgttttcggctttgtgagaaaccttaccatcaaacacgatggccagcaacgttaccaacaagacagatcctcgctccatgaactcccgtgtattcattgggaatctcaacactcttgtggtcaagaaatctgatgtggaggcaatcttttcgaagtatggcaaaattgtgggctgctctgttcataagggctttgccttcgttcagtatgttaatgagagaaatgcccgggctgctgtagcaggagaggatggcagaatgattgctggccaggttttagatattaacctggctgcagagccaaaagtgaaccgaggaaaagcaggtgtgaaacgatctgcagcggagatgtacggctcctcttttgacttggactatgactttcaacgggactattatgataggatgtacagttacccagcacg

SEQ ID NO: 50 - DNA, 1211 bp, Homo sapiens
  misc feature (1189): n equals a,t,g, or c
  misc feature (1191): n equals a,t,g, or c
ggcggttcagccatgaggctggctgtgcttttctcgggggccctgctggggctactggcagcccaggggacagggaatgactgtcctcacaaaaaatcagctactttgctgccatccttcacggtgamacccacggttacagagagcactggaacaaccagccacaggactaccaagagccacaaaaccaccactcacaggacaaccaccacaggcaccaccagccacggacccacgactgccactcacaaccccaccaccaccagccatggaaacgtcacagttcatccaacaagcaatagcactgccaccagccagggaccctcaactgccactcacagtcctgccaccactagtcatggaaatgccacggttcatccaacaagcaacagcactgccaccagcccaggattcaccagttctgcccacccagaaccacctccaccctctccgagtcctagcccaacctccaaggagaccattggagactacacgtggaccaatggttcccagccctgtgtccacctccaagcccagattcagattcgagtcatgtacacaacccagggtggaggagaggcctggggcatctctgtactgaaccccaacaaaaccaaggtccagggaagctgtgagggtgcccatccccacctgcttctctcattcccctatggacacctcagctttggattcatgcaggacctccagcagaaggttgtctacctgagctacatggcggtggagtacaatgtgtccttcccccacgcagcacagtggacattctcggctcagaatgcatcccttcgagatctccaagcacccctggggcagagcttcagttgcagcaactcgagcatcattctttcaccagctgtccacctcgacctgctctccctgaggctccaggctgctcagctgccccacacaggggtctttgggcaaagtttctcctgccccagtgaccggtccatcttgctgcctctcatcatcggcctgatccttcttggcctcctcgccctggtgcttattgctttctgcatcatccggagacgcccatccgcctaccaggccctctgagcatttgcttcaaaccccagggcactgagggggttggggtgtggtgggggggtaccttatttcctcgacacgcaactggctcaaagtgtgggattataagcgtgagcaacgngncggctgcttaaattatttat

SEQ ID NO: 51 - DNA, 1600 bp, Homo sapiens
  misc feature (41): n equals a,t,g, or c
  misc feature (44): n equals a,t,g, or c
  misc feature (1235): n equals a,t,g, or c
  misc feature (1567): n equals a,t,g, or c
  misc feature (1579): n equals a,t,g, or c
  misc feature (1600): n equals a,t,g, or c
ggccggccgagttccgggctgcgcagtccagggcctgggcnacnttccttcaagaaaacaagcagcttctgcgcagacgtgctggcccaggacctgcataagccagctttcgaggcagacatatctgagctcatcctttgccagaacgaggttgactacgctctcaagaaccttcaggcctggatgaaggatgaaccacggtccacgaacctgttcatgaagctggactcggtcttcatctggaaggaaccctttggcctggtcctcatcatcgcaccctggaactacccactgaacctgaccctggtgctcctggtgggcgccctcgcsgcaggaaattgcgtggtgctgaagccgtcagaaatcagccagggcacagagaaggtcctggctgaggtgctgccccagtacctggaccagagctgctttgccgtggtgctgggcggaccccaggagacagggcagctgctagagcacaagttggactacatcttcttcacagggagccctcgtgtgggcaagattgtcatgactgctgccaccaagcacctgacgcctgtcaccctggagctggggggcaagaacccctgctacgtggacgacaactgcgacccccagaccgtggccaaccgcgtggcctggttctgctacttcaatgccggccagacctgcgtggcccctgactacgtcctgtgcagccccgagatgcaggagaggctgctgcccgccctgcagagcaccatcacccgtttctatggcgacgacccccagagctccccaaacctgggccgcatcatcaaccagaaacagttccagcggctgcgggcattgctgggctgcggccgygtggccattgggggccagagcraygagagcgatcgytacatcgcccccacggtgctggtggaygtgcaggagayggagcctgtgatgcaggaggagatcttcgggcccatcctgcccatcgtgaacgtgcagagcttggacgaggccatcgagttcatcaaccggcgggagaagcccctggccctgtacgccttctccaacagcagccaggtggtcaagcgggtgctgacccagaccagcagcgggggcttctgtgggaacgacggcttcatgcacatgaccctggccagcctgccttttggaggagtgggtgccagtgggatgggccggtaccatggcaagttctccttcgacaccttctcccaccatcgcgcctgcctcctgcgcanccggggatggagaagctcaacgccctccgctacccgccgcaatcgccgcgccgcctgaggatgctgctggtggccatggaggcccaaggctgcagctgcacactgctctgagcccttccccaggcccaggctgtagaccaccatgacagctgtcgcctgcggctggtggagacggggcctgggctcccgggcccgaggaggaaaaggattgccaaggctccagggcamcccttcaaagcagcgcytgccttccttccctcctgggtctttcctyttcctgscttmagcttcttccttmagcsggtcccaaacatgagagccgaggttgggangcattgggaaanagtgcagtgactcaacccctn

SEQ ID NO: 52 - DNA, 1568 bp, Homo sapiens
aattccagaaaggaaataatctcctgtcaagagttaatatgttgaaaaataggcttcaatcattggaagcaattgagaaagatttcctaaaaaacaaattaaatcaagactctgggaaatccacaacagcattacaccaagaaaacaataagattaaggagctctctcaagaagtggaaagactgaaactgaagctaaaggacatgaaagccattgaggatgacctcatgaaaacagaagatgaatatgagactctagaacgaggtatgctwatgaacgagacaaagctcaatttttatctaaagagctagaacatgttaaaatggaacttgctaagtacaagttagcagaaaagacagagaccagccatgaacaatggcttttcaaaaggcttcaagaagaagaagctaagtcagggcacctctcaagagaagtggatgcattaaaagagaaaattcatgaatacatggcaactgaagacctaatatgtcacctccagggagatcactcagtcctgcaaaaaaaactaaatcaacaagaaaacaggaacagagatttaggaagagagattgaaaacctcactaaggagttagagaggtaccggcatttcagtaagagcctcaggcctagtctcaatggaagaagaatttccgatcctcaagtattttctaaagaagttcagacagaagcagtagacaatgaaccacctgattacaagagcctcattcctctggaacgtgcagtcatcaatggtcagttatatgaggagagtgagaatcaagacgaggaccctaatgatgagggatctgtgctgtccttcaaatgcagccagtctactccatgtcctgttaacagaaagctatggattccctggatgaaatccaaggagggccatcttcagaatggaaaaatgcaaactaaacccaatgccaactttgtgcaacctggagatctagtcctaagccacacacctgggcagccacttcatataaaggttactccagaccatgtacaaaacacagccactcttgaaatcacaagtccaaccacagagagtcctcactcttacacgagtactgcagtgataccgaactgtggcacgccaaagcaaaggataaccatcctccaaaacgcctccataacaccagtaaagtccaaaacctctaccgaagacctcatgaatttagaacaaggcatgtccccaattaccatggcaacctttgccagagcacagaccccagagtcttgtggttctctaactccagaaaggacaatgtcccctattcaggttttggctgtgactggttcagctagctctcctgagcagggacgctccccagaaccaacagaaatcagtgccaagcatgcgatattcagagtctccccagaccggcagtcatcatggcagtttcagcgttcaaacagcaatagctcaagtgtgataactactgaggataataaaatccacattcacttaggaagtccttacatgcaarctgtagccagccctgtgagacctgccagcccttcagcaccactgcaggataaccgaactcaaggcttaatta

SEQ ID NO: 53 - DNA, 1043 bp, Homo sapiens
gcgggagcccaggccagctttggggttgtccctggacttgtcttggttccagaacctgacgacccggcgacggcgacgtctcttttgactaaaagacagtgtccagtgctccagcctaggagtctacggggaccgcctcccgcgccgccaccatgcccaacttctctggcaactggaaaatcatccgatcggaaaacttcgaggaattgctcaaagtgctgggggtgaatgtgatgctgaggaagattgctgtggctgcagcgtccaagccagcagtggagatcaaacaggagggagacactttctacatcaaaacctccaccaccgtgcgcaccacagagattaacttcaaggttggggaggagtttgaggagcagactgtggatgggaggccctgtaagagcctggtgaaatgggagagtgagaataaaatggtctgtgagcagaagctcctgaagggagagggccccaagacctcgtggaccagagaactgaccaacgatggggaactgatcctgaccatgacggcggatgacgttgtgtgcaccagggtctacgtccgagagtgagtggccacaggtagaaccgcggccgaagcccaccactggccatgctcaccgccctgcttcactgccccctccgtcccaccccctccttctaggatagcgctccccttaccccagtcacttctgggggtcactgggatgcctcttgcagggtcttgctttctttgacctcttctctcctcccctacaccaacaaagaggaatggctgcaagagcccagatcacccattccgggttcactccccgcctccccaagtcagcagtcctagccccaaaccagcccagagcagggtctctctaaaggggacttgagggcctgagcaggaaagactggccctctagcttctaccctttgtccctgtagcctatacagtttagaatatttatttgttaattttattaaaatgctttaaaaaaawaaaaaaaaaaaaaaaaaaaaaaaaaaaaaaaaaagggcggccgctcgcgatctagaac

SEQ ID NO: 54 - DNA, 2571 bp, Homo sapiens
  misc feature (2556): n equals a,t,g, or c
  misc feature (2570): n equals a,t,g, or c
gagcagagaagaaatccacaaagactcacagtctgctggtgggcagagaagacagaaacgacatgagcacagcaggaaaagtaatcaaatgcaaagcagctgtgctatgggaggtaaagaaacccttttccattgaggatgtggaggttgcacctcctaaggcttatgaagttcgcattaagatggtggctgtaggaatctgtcgcacagatgaccacgtggttagtggcaacctggtgaccccccttcctgtgattttaggccatgaggcagccggcatcgtggagagtgttggagaaggggtgactacagtcaaaccaggtgataaagtcatcccgctctttactcctcagtgtggaaaatgcagagtttgtaaaaacccggagagcaactactgcttgaaaaatgatctaggcaatcctcgggggaccctgcaggatggcaccaggaggttcacctgcagggggaagcccatycaccacttccttggcaycagcaccttctcccagtacacggtggtggatgagaatgcagtggccaaaattgatgcagcctcgcccctggagaaagtctgcctcattggctgtggattctcgactggttatgggtctgcagttaacgttgccaaggtcaccccaggctctacctgtgctgtgtttggcctgggaggggtcggcctatctgctgttatgggctgtaaagcagctggagcagccagaatcattgcggtggacatcaacaaggacaaatttgcaaaggccaaagagttgggtgccactgaatgcatcaaccctcaagactacaagaaacccatccaggaagtgctaaaggaaatgactgatggaggtgtggatttttcgtttgaagtcatcggtcggcttgacaccatgatggcttccctgttatgttgtcatgaggcatgtggcacaagcgtcatcgtaggggtacctcctgcttcccagaacctctcaataaaccctatgctgctactgactggacgcacctggaagggggctgtttatggtggctttaagagtaaagaaggtatcccaaaacttgtggctgattttatggctaagaagttttcactggatgcgttaataacccatgttttaccttttgaaaaaataaatgaaggatttgacctgcttcactctgggaaaagtatccgtaccgtcctgacgttttgaggcaatagagatgccttcccctgtagcagtcttcagcctcctctaccctacaagatctggagcaacagctaggaaatatcattaattcagctcttcagagatgttatcaataaattacacatgggggctttccaaagaaatggaaattgatgggaaattatttttcaggaaaatttaaaattcaagtgagaagtaaataaagtgttgaacatcagctggggaattgaagccaacaaaccttccttcttaaccattctactgtgtcacctttgccattgaggaaaaatattcctgtgacttcttgcatttttggtatcttcataatctttagtcatcgaatcccagtggaggggacccttttacttgccctgaacatacacatgctgggccattgtgattgaagtcttctaactctgtctcagttttcactgtcgacattttcctttttctaataaaaatgtaccaaatccctggggtaaaagctagggtaaggtaaaggatagactcacatttacaagtagtgaaggtccragagttctaaatacaggaaatttcttaggaactcaaataaaatgccccacattttactacagtaaatggcagtgtttttatgacttttatactatttctttatggtcgatatacaattgattttttaaaataatagcagatttcttgcttcatatgacaaagcctcaattactaattgtaaaaactgaactattcccagaatcatgttcaaaaaatctgtaatttttgctgatgaaagtgcttcattgactaaacagtattagtttgtggctataaatgattatttagatgatgactgaaaatgtgtataaagtaattaaaagtaatatggtggctttaagtgtagagatgggatggcaaatgctgtgaatgcagaatgtaaaattggtaactaagaaatggcacaaacaccttaagcaatatattttcctagtagatatatatatacacatacatatatacacatatacaaatgtatatttttgcaaaattgttttcaatctagaacttttctattaactaccatgtcttaaaatcaagtctataatcctagcattagtttaatattttgaatatgtaaagacctgtgttaatgctttgttaatgcttttcccactctcatttgttaatgctttcccactctcaggggaaggatttgcattttgagctttatctctaaatgtgacatgcaaagattattcctggtaaaggaggtagctgtctccaaaaatgctattgttgcaatatctacattctatttcatattatgaaagaccttagacataaagtaaaatagtttatcattraaaamaaaaaaaaaaaaaaaaaaaaaaanaaaaaaaaaaaaana

SEQ ID NO: 55 - DNA, 1302 bp, Homo sapiens
  misc feature (1282): n equals a,t,g, or c
  misc feature (1301): n equals a,t,g, or c
gcggacgctgggtckcccatccgcgtctgttctgcctcactcccgagctctactgactcccaamagagcgcccaagaagaaaatggccataagtggagtccctgtgctaggatttttcatcatagctgtgctgatgagcgctcaggaatcatgggctatcaaagaagaacatgtgatcatccaggccgagttctatctgaatcctgaccaatcaggcgagtttatgtttgactttgatggtgatgagattttccatgtggatatggcaaagaaggagacggtctggcggcttgaagaatttggacgatttgccagctttgaggctcaaggtgcattggccaacatagctgtggacaaagccaacctggaaatcatgacaaagcgctccaactatactccgatcaccaatgtacctccagaggtaactgtgctcacgaacagccctgtggaactgagagagcccaacgtcctcatctgtttcatcgacaagttcaccccaccagtggtcaatgtcacgtggcttcgaaatggaaaacctgtcaccacaggagtgtcagagacagtcttcctgcccagggaagaccaccttttccgcaagttccactatctccccttcctgccctcaactgaggacgtttacgactgcagggtggagcactggggcttggatgagcctcttctcaagcactgggagtttgatgctccaagccctctcccagagactacagagaacgtggtgtgtgccctgggcctgactgtgggtctggtgggcatcattattgggaccatcttcatcatcaagggagtgcgcaaaagcaatgcagcagaacgcagggggcctctgtaaggcacatggaggtgatggtgtttcttagagagaagatcactgaagaaacttctgctttaatgactttacaaagctggcaatattacaatccttgacctcagtgaaagcagtcatcttcagcgttttccagccctatagccaccccaagtgtggttatgcctcctcgattgctccgtactctaacatctagctggcttccctgtctattgccttttcctgtatctattttcctctatttcctatcattttattatcaccatgcaatgcctctggaataaaacatacaggagtctgtctctgctatggaatgccccatggggcatctcttgtgtacttattgtttaaggtttcctcaaactgtgatttttctgaacacaataaactattttgatgggtggaaaaaaaaaaaaaaaaaaaaaaagggggggcccggtnccccaatcccccccaaaant

SEQ ID NO: 56 - DNA, 1437 bp, Homo sapiens
  misc feature (1428): n equals a,t,g, or c
gccggagcagggaggtgagaggctcagctgccctccagaactcctccctggggacaacccctcccagccaatagcacagcctaggtccccctatataaggccacggctgctggcccttcctttgggtcagtgtcacctccaggatacagacagccccccttcagcccagcccagccaggtctcctacaccgccaccatgccattcggtaacacccacaacaagttcaagctgaattacaagcctgaggaggagtaccccgacctcagcaaacataacaaccacatggccaaggtactgacccttgaactctacaagaagctgcgggacaaggagactccatctggcttcactgtagacgatgtcatccagacaggagtggacaacccaggtcaccccttcatcatgaccgtgggctgcgtggctggtgatgaggagtcctacgaagttttcaaggaactctttgaccccatcatctcggatcgccacgggggctacaaacccactgacaagcacaagactgacctcaaccatgaaaacctcaagggtggagacgacctggaccccaactacgtgctcagcagccgcgtccgcactggccgcagcatcaagggctacacgttgcccccacactgctcccgtggcgagcgccgggcggtggagaagctctctgtggaagctctcaacagcctgacgggcgagttcaaagggaagtactaccctctgaagagcatgacggagaaggagcagcagcagctcatcgatgaccacttcctgttcgacaagcccgtgtccccgctgctgctggcctcaggcatggcccgcgactggcccgacgcccgtggcatctggcacaatgacaacaagagcttcctggtgtgggtgaacgaggaggatcacctccgggtcatctccatggagaaggggggcaacatgaaggaggttttccgccgcttctgcgtagggctgcagaagattgaggagatctttaagaaagctggccaccccttcatgtggaaccagcacctgggctacgtgctcacctgcccatccaacctgggcactgggctgcgtggaggcgtgcatgtgaagctggcgcacctgagcaagcaccccaagttcgaggagatcctcacccgcctgcgtctgcagaagaggggtacaggtggcgtggacacagctgccgtgggctcagtatttgacgtgtccaacgctgatcggctgggctcgtccgaagtagaacaggtgcagctggtggtggatggtgtgaagctcatggtggaaatggagaagaagttggagaaaggccagtccatcgacgacatgatccccgcccagaagtaggcgcctgccacctgccaccgactgytggcaggtctcttctttccagagtccaacccaccaggagctctgttatgagagctccaganactcgagct

SEQ ID NO: 57 - DNA, 2033 bp, Homo sapiens
  misc feature (1012): n equals a,t,g, or c
  misc feature (1014): n equals a,t,g, or c
  misc feature (1016): n equals a,t,g, or c
  misc feature (1964): n equals a,t,g, or c
  misc feature (2029): n equals a,t,g, or c
ggcacgaggagggagccacggccagcggctgtaacacttcatggctcttactccacctctcttgctcctctctgaagggaccatgaccttgggctcccccaggaaaggccttctgatgctgctgatggccttggtgacccagggagaccctgtgaagccgtctcggggcccgctggtgacctgcacgtgtgagagcccacattgcaaggggcctacctgccggggggcctggtgcacagtagtgctggtgcgggaggaggggaggcacccccaggaacatcggggctgcgggaacttgcacagggagctctgcagggggcgccccaccgagttcgtcaaccactactgctgcgacagccacctctgcaaccacaacgtgtccctggtgctggaggccacccaacctccttcggagcarccgggaacagatggccagctggccctgatcctgggccccgtgctgccttgctggcccctggtggcccctgggtgtccctgggcctgtggcatgtccgacggaggcaggagaagcagcgtggcctgcacagcgagctgggarartccagtctcatccctgaaagcatctgagcagggcgacagcatgttgggggacctccctggacagtgactgcaccacagggagtggctcagggctccccttcctggtgcagaggacagtggcacggcaggttgccttggtggagtgtgtgggaaaaggccgctatggcgaagtgtggcggggcttgtggcacggtgagagtgtggccgtcaagatcttctcctcgagggatgaacagtcctggttccgggagactgagatctataacacagtgttgctcagacacgacaacatcctaggcttcatcgcctcagacatgacctcccgcaactcgagcacgcagctgtggctcatcacgcactaccacgagcacggctccctctacgactttctgcagagacagacgctggagccccatctggctctgaggctagctgtgtccgcggcatgcrncntnggcgcacctgcacgtggagatcttyggtacacagggcaaaccagccattgcccaccgcgacttcaagagccgcaatgtgctggtcaagagcaacctgcagtgttgcatcgccgacctgggcctggctgtgatgcactcacagggcagcgattacctggacatcggcaacaacccgagagtgggcaccaagcggtacatggcacccgaggtgctggacgagcagatccgcacggactgctttgagtcctacaagtggactgacatctgggcctttggcctggtgctgtgggagattgcccgccggaccatcgtgaatggcatcgtggaggactatagaccacccttctatgrtgtggtgcccaatgaccccagctttgaggacatgaagaaggtggtgtgtgtggatcagcagacccccaccatccctaaccggctggctgcagacccggtcctctcaggcctagctcagatgatgcgggagtgctggtacccaaacccctctgcccgactcamcgcgctgggatcaagaagacactacaaaaaattagcaacagtccagagawgcctaaagtgattcaatagcccaggagcacctgattcctttctgcctgcaggggctgggggggtggggggcagtggatggtgccctatctgggtagaggtagtgtgagtgtggtgtgtgctggggatgggcagctgcgcctgcctgctcggcccccagcccacccagccaaaaatacagctgggctgaaacctgatcccctgctgtctggcctgctcaaagcggcaggctccctgacgcctggctctctccccacccctatggccagcatggtgcaccccctaccactcccgggacaggatgcaaaagaggctccagagtcagagtgccaagccagggaatcccagtcccagactcagagcccgggccttgcaatttgccccctnggcccttggatcaaccccactgccccaccagagctgccaaggtggcacaggggcctgttcaaccnctgg

SEQ ID NO: 58 - DNA, 1832 bp, Homo sapiens
  misc feature (335): n equals a,t,g, or c
  misc feature (357): n equals a,t,g, or c
  misc feature (423): n equals a,t,g, or c
  misc feature (1778): n equals a,t,g, or c
  misc feature (1805): n equals a,t,g, or c
  misc feature (1814): n equals a,t,g, or c
ggcacgaggggggcggccacgggcacgccggccaccaccaccaccaccatcaccaccaccaccacccgcccatgatcgctctgcagccgctggtcaccgacgacccgacccaggtgcaccaccaccaggaggtgatcctggtgcagacgcgcgaggaggtggtgggcggcgacgactcggacgggctgcgcgccgaggacggcttcgaggatcagattctcatcccggtgcccgcgccggccggcggcgacgacgactacattgaacaaacgctggtcaccgtggcggcggccggcaagagcggcggcggcggytcgttcgtcgtcgggaggcgnccgcgtcaagaagggcggcggnaagaagagcggcaagaagagttacctcagcggcggggcgcgcggcgggcggcgsggcgcacccggngcaacaagaagtgggagcagaagcaggtgcagatcaagaccctggagggcgagttctcggtcaccatgtggtcctcagatgaaaaaaaagatattgaccatgagacagtggttgaagaacagatcattggagagaactcacctcctgattattcagaatatatgacaggaaagaaacttcctcctggaggaatacctggcattgacctctcagatcccaaacaactggcagaatttgctagaatgaagccaagaaaaattaaagaagatgatgctccaagaacaatagcttgccctcataaaggctgcacaaagatgttcagggataactcggccatgagaaaacatctgcacacccacggtcccagagtccacgtctgtgcagaatgtggcaaagcttttgttgagagttcaaaactaaaacgacaccaactggttcatactggagagaagccctttcagtgcacgttcgaaggctgtgggaaacgcttttcactggacttcaatttgcgcacacatgtgcgaatccataccggagacaggccctatgtgtgccccttcgatggttgtaataagaagtttgctcagtcaactaacctgaaatctcacatcttaacacatgctaaggccaaaaacaaccagtgaaaagaagagagaagacccttctcgaccacgggaagcatcttccagaagtgtgattgggaataaatatgcctctcctttgtatattatttctaggaagaattttaaaaatgaatcctacacacctaagggacatgttttgataaagtagtaaaaattaaaaaaaaaaaactttactaagatgacattgctaagatgctctatcttgctctgtaatctcgtttcaaaaacacagtgtttttgtaaagtgtggtcccaacaggaggacaattcatgaacttcgcatcaaaagacaattctttatacaacagtgctaaaaatgggacttcttttcacattcttataaatatgaagctcacctgttgcttacaatttttttaattttgtattttccaagtgtgcatattgtacacttttttggggatatgcttagtaatgctacgtgtgatttttctggaggttgataactttgcttgcagtagattttctttaaaagaatgggcagttacatgcatacttcaaaagtattttcctgtaaaaaaaaaaaagttatataggttttgtttgctatcttaattttggttgtattctttgatgttaacacattttgtataattgtatcgtatagctgtattgaatccatgtaggtatccaaatattaggatgtgatttaatagtgttaatccaatttaaaaccccattttttaggtcacnttttttttttcccaaaaaaaatactgnccagatgcnggatgttccagggtaaat

SEQ ID NO: 59 - DNA, 1406 bp, Homo sapiens
  misc feature (1382): n equals a,t,g, or c
  misc feature (1393): n equals a,t,g, or c
  misc feature (1399): n equals a,t,g, or c
  misc feature (1400): n equals a,t,g, or c
gaagttaaaggcaaaattgtaaatcagtcgagatcgggtgccttcagggtggtatggctgtataccaaaattgtaaatcactacatgaagcttatatattggtttggcctgaaagtgaagtggggtaggcagggggcgggcttacaggttatggtggattcaaagactccctgatttgtgattggttaaggaagcaaagctttgtctaaaaacttggggtccgcagaaaggaacattaaggtctggccaggcccctcaggaagaaactgagagcaaagaatggaggtcagagtttagtccctggtgttcccccttatctgacgtctgtgtgaatccatttggtgggggtctgggtttctgaaaagtagctcaggggcacgtgttaaggatgtctctaggtgactctaacttccctggctattgtttgaaactgttatgaccttcttgcttatcagcttgctggtttccttctcggggcgagctgggtgcctggagttttcggtgaaggaaactcaagattctcctttatttctgtgcttgtgggaatccccctggcacaccccaaagaggggtccctgctccgtctcacagggatctttttgtatatttggcttagcatcatacatttgccatgttgtttcatcatctgcctaatttactgtctctactaaaaatacaaaaattgtttagctctgtttttcataatagaaatagaaaaggtaaaattgcttttcttctgaaaagaacaagtattgttcatccaagaagggtttttgtgactgaatcagcagtgcctgccctagtcatagctgtgcttcaraaacctcagcatgattagtgttggagcaaaacaaggaagcaaagcaaatacwgtttttgaaattctatctgttgcttgaactattttgtaataattaaactttgatgttgagaaatcacaactttattgtacacttcattgcaacttgaaattcatggtcttaaagtgagatttgaatttctattgagcgcctttaaaaaagtaataccaaaccataaagttaaaatctatgtatattgagtcatatctaaaaccacgtataaacataaattgtatttcctgttttaattccaggggaagtactgtttgggaaagctattattaggtaaatgttttacaaattactgtttctcactttcagtcataccctaatgatcccagcaagataatgtcctgtcttctaagatgtgcatcaagcctggtacatactgaaaaccctataaggtcctggataatttttgtttgattattcattgaagaaacatttattttccaattgtgtgaagtttttgactgttaataaaagaatctgtcaaccatcaaaaaaaaaaaaaaaamccwnggggggggggnccccanncccccc

SEQ ID NO: 60 - DNA, 265 bp, Homo sapiens
cccgtccggccccagccgcggcccgggaatctacgccacccgaaaagcgactataaacgccggcgcctscgtccccagccgcggctcgggaatccacccgaagagtggctataaacgtccgcgcctccattgcgctctcctyttcacttaggacactggtcctcccacgcctgacaycgacgtcgccaggaccgcggggttkggggaamtttggctgtcccaygtctttcaaataaagctgttttgtctaactcaaaaaaaaaaa

SEQ ID NO: 61 - DNA, 937 bp, Homo sapiens
  misc feature (882): n equals a,t,g, or c
  misc feature (890): n equals a,t,g, or c
  misc feature (923): n equals a,t,g, or c
ctttgctacttttgattacttgtcacagttgtacttttagcttcccccatcctgcaaggccactcaaccatgtgctagctggagtgatctttattcacaatgtctttacaaaggctcctgcaacacagcagcaatggcaatttggcggacttctgcgctgggccagcgtatagctcttactccacactcaccggcagccttacgatggacgataatagaaggattcaaatgctagcagacacggtggctactctgcctcggggacgaaagcagcttgctttgaccagatcaagttctttaagtgacttttcctggtctcaaagaaagcttgttactgtggagaagcaggataatgaaacatttggatttgaaattcagtcttacaggccccagaatcagaatgcctgctcctcggaaatgttcactttgatatgcaaaatacaggaggacagcccagctcactgtgctggcctgcaagctggtgatgtccttgcaaatatcaatggtgtgagcacagaaggttttacctacaaacaagtcgttgacctgatcagatcgtccggaaacctgctaacgatagagactcttaatggaacaatgattctgaaaagaacggagcttgaagcaaagctgcaggttttaaagcaaactttgaaacaaaatgggtggagtacagatctctgcagttacaggaacatcgtctgcttcatggtgatgcagctaattgccccagtttgggaaaacatgggacttgggatggaattgtctttgtttggacccctgcctgggccaggcccagcccttgtggaccggaatcgattatccagtgagagcagctgttaaaagctggctgagctccatgacgatgggacattgaaaatngctaccanacttttgtttcttaaggactccagcaggggggnccttcaaatcgggc

SEQ ID NO: 62 - DNA, 712 bp, Homo sapiens
  misc feature (672): n equals a,t,g, or c
  misc feature (697): n equals a,t,g, or c
  misc feature (707): n equals a,t,g, or c
  misc feature (711): n equals a,t,g, or c
aattcggcagagcggcacgagcggcacgaggccaagaggaccccaggagcccagagcagcggkgagagggtccttcctagcctcggcccgccgggtcggttcctggctggtgtctgctgagggagtggggggcccagcscttctyttctcccccgccaaaccacagtgggagctggggcagggggagagccaggcaatcgggggccaaaratgggggtgctcgcctacagtytgcatctgtagtgccttgtggggtatccaggaacaccctcccagcaggggatgggaaccctgtcccatgaagccctctcctcagctttacttgctcccccgcccttagccttggggagaaatggcccgtggtgggctgaccccccaccctccacacacacagttccatgacccagcgggcccccaggggcatcaggtgctggtcctcctccctcctggcctcgacccctaagggcttcscccctcccaggggcctgtaactaagtcgggtctgccaggcagggggcctgtgttctgtgccccttgggagacaggaactggcgagttcaggtggggtggggacagcacagactgttccaccgttgtgcatattgttgcttctgaaccacaaactgtataaatggatggttttttgcaaaaaaaaaaaaaaaaaatgccccncgagggggggcccggtaccaaattngccctaaagngagng

SEQ ID NO: 63 - DNA, 1058 bp, Homo sapiens
  misc feature (1026): n equals a,t,g, or c
  misc feature (1048): n equals a,t,g, or c
  misc feature (1051): n equals a,t,g, or c
cagattcactggctgatgctcactgctcactgtctatccccacgaaatttagttttatcagtagtcttaaagtgttgatctcaaacaagtacattagaaaaatcatgtttcttctctctcatcttactttttcttctcaratttctcccttcctagaacattctctctgtttagcactaatgttcacctcgtattttttggaagtgcaaaaatctcaatttgtgtctgtttacagctctctctcctcactgctcacagcaaggggttctgtatcagtggatttcattttgtagctgctgagatgttaaggcaagcctcagcatctgccccygctgggtgcacaatgctgcttcctcgaagagaagacacagagtccaagtggcaggacttgaggttggcttccactctgccttagaagttaattttccaaagtacattacaaatctctgaggccattaggggaaaaggaaggggtgtggtttgtctttgaaattacggttaatacttttagacagtaagtccggctggttgcagggctatttgccccgacagcatcagcctgtaacatttcttctctttcctttgtgccactgagtcgttccctggccagaggacataaatggtgctggtaggaggttatcagagtaaggaaggtagcagatataggtgcagggtgcctgtcattcactgtgttatttggtttaaatcaaagtgattctgggggaagctatgctctttcagtggataataaaattggtaactctattgtaaaacatgtcaatggtgtgtgaagaaaaatcaaccaatctgtaggtgttgataactagacagtactgtgtatgttacgtgcctgtgtggatgtgcacttccagcatggtatgtgtagcgatgtggatcatgccagagttcgtagatcctgttttggggtttgcacatggatcgtatgttaagctttttcttttcaataaatgaattttttttttttttttttttttttttttttttttttttttttttttttttttntttttttttttttttttttttnggnaaaaaaa

SEQ ID NO: 64 - DNA, 2691 bp, Homo sapiens
  misc feature (2653): n equals a,t,g, or c
  misc feature (2667): n equals a,t,g, or c
  misc feature (2683): n equals a,t,g, or c
gttaaaggtgacaaaggaaatccaggctggccaggagcacccggtgtcccagggcccaagggagaccctggattccagggcatgcctggtattggtggctctccaggaatcacaggctctaagggtgatatggggcctccaggagttccaggatttcaaggtccaaaaggtcttcctggcctccagggaattaaaggtgatcaaggcgatcamggcgtcccgggagctaaaggtctcccgggtcctcctggccccccaggtccttacgacatcatcaaaggggagcccgggctccctggtcctgagggccccccagggctgaaagggcttcagggactgccaggcccgaaaggccagcaaggtgttacaggattggtgggtatacctggacctccaggtattcctgggtttgacggtgcccctggccagaaaggagagatgggacctgccgggcctactggtccaagaggatttccaggtccaccaggccccgatgggttgccaggatccatggggcccccaggcaccccatctgttgatcacggcttccttgtgaccaggcatagtcaaacaatagatgacccacagtgtccttctgggaccaaaattctttaccacgggtactctttgctctacgtgcaaggcaatgaacgggcccatggccaggacttgggcacggcyggcagctgcctgcgcaagttcagcacaatgcccttcctgttctgcaatattaacaacgtgtgcaactttgcatcacgaaatgactactcgtactggctgtccacccctgagcccatgcccatgtcaatggcacccatcacgggggaaaacataagaccatttattagtaggtgtgctgtgtgtgaggcgcctgccatggtgatggccgtgcacagccagaccattcagatcccaccgtgccccagcgggtggtcctcgctgtggatcggctactcttttgtgatgcacaccagcgctggtgcagaaggctctggccaagccctggcgtcccccggctcctgcctggaggagtttagaagtgcgccattcatcgagtgtcacggccgtgggacctgcaattactacgcaaacgcttacagcttttggctcgccaccatagagaggagcgagatgttcaagaagcctacgccgtccaccttgaaggcaggggagctgcgcacgcacgtcagccgctgccaagtctgtatgagaagaacataatgaagcctgactcagctaatgtcacaacatggtgctacttcttcttctttttgttaacagcaacgaaccctagaaatatatcctgtgtacctcactgtccaatatgaaaaccgtaaagtgccttataggaatttgcgtaactaacacaccctgcttcattgacctctacttgctgaaggagaaaaagacagcgataagctttcaatagtggcataccaaatggcacttttgatgaaataaaatatcaatattttctgcaatccaatgcactgatgtgtgaagtgagaactccatcagaaaaccaaagggtgctaggaggtgtgggtgccttccatactgtttgcccattttcattcttgtattataattaattttctacccccagagataaatgtttgtttatatcactgtctagctgtttcaaaatttaggtcccttggtctgtacaaataatagcaatgtaaaaatggttttttgaacctccaaatggaattacagactcagtagccatatcttccaaccccccagtataaatttctgtctttctgctatgtgtggtactttgcagctgcttttgcagaaatcacaattttcctgtggaataaagatggtccaaaaatagtcaaaaattaaatatatatatatattagtaatttatatagatgtcagcaattaggcagatcaaggtttagtttaacttccactgttaaaataaagcttacatagttttcttcctttgaaagactgtgctgtcctttaacataggtttttaaagactaggatattgaatgtgaaacatccgttttcattgttcacttctaaaccaaaaattatgtgttgccaaaaccaaacccaggttcatgaatatggtgtctattatagtgaaacatgtactttgagcttattgtttttattctgtattaaatattttcagggttttaaacactaatcacaaactgaatgacttgacttcaaaagcaacaaccttaaaggccgtcatttcattagtattcctcattctgcatcctggcttgaaaaacagctctgttgaatcacagtatcagtattttcacacgtaagcacattcgggccatttccgtggtttctcatgagctgtgttcacagacctcagcagggcatcgcatggaccgcaggagggcagattcggaccactaggcctgaaatgacatttcactaaaagtctccaaaacatttctaagactactaaggccttttatgtaatttctttaaatgtgtatttcttaagaattcaaatttgtaataaaactatttgtataaaaattaagcttttattaatttgttgctagtattgccacagacgcattaaaagaaacttactgcacaagctgctaataaatttgtaagctttgcaaaaaaaaaaaaaaaaaaaaccccgggggggggcccggtncccaattgcgcccnaaggggggccgttttnacattcca

SEQ ID NO: 65 - DNA, 1517 bp, Homo sapiens
  misc feature (138): n equals a,t,g, or c
  misc feature (548): n equals a,t,g, or c
  misc feature (1380): n equals a,t,g, or c
ggcacgagctgaacggaaagagctatgatgagacggtggatatcttctcctttgggatcgttctctgtgagatcattgggcaggtgtatgcagatcctgactgccttccccgaacactggactttggcctcaacgtgnaagcttttctgggagaaagtttgttcccacagattgtcccccggccttcttcccgctggccgccatctgctgcagactggagcctgagagcagaccagcattctcgaaattggaggactcctttgaggccctctccctgtacctgggggagctgggcatcccgctgcctgcagagctggaggagttggaccacactgtgagcatgcagtacggcctgacccgggactcacctccctagccctggsccagccccctgcagggggktgttctacagccagcattgcccctctgtgccccattcctgctgtgagcagggccgtccgggcttcctgtggattggcggaatgtttagaagcagaacaagccattcctattacctccccaggaggcaagtgggcgcacaccagggnaaatgtatctccacaggttctggggcctagttactgtctgtaaatccaatacttgcctgaaagctgtgaagaagaaaaaaacccctggcctttgggccagkaggaatctgttactcgaatccacccaggaactccctggcagtggattgtgggaggctcttgcttacactaatcagcgtgacctggacctgctgggcaggatcccagggtgaacctgcctgtgaactctgaagtcactagtccagctgggtgcaggaggacttcaagtgtgtggacgaaagaaagactgatggctcaaagggtgtgaaaaagtcagtgatgctccccctttctactccagatcctgtccttcctggagcaaggttgagggagtaggttttgaagagtcccttaatatgtggtggaacaggccaggagttagagaaagggctggcttctgtttacctgctcactggctctagccagcccagggaccacatcaatgtgagaggaagcctccacctcatgttttcaaacttaatactggagactggctgagaacttacggacaacatcctttctgtctgaaacaaacagtcacaagcamaggaagaggctgggggactagaaagaggccctgccctctagaaagctcagatcttggcttctgttactcatactcgggtgggctccttagtcagatgcctaaaacattttgcctaaagctcgatgggttctggaggacagtgtggcttgtcacaggcctagagtctgagggaggggagtgggagtctcagcaatctcttggtcttggcttcatggcaaccactgctcacccttcaacatgcctggntttaggcagcagcttgggctgggaagaggtggtggcagagtytcaaagctgagatgctgagagagatagctccctgagctgggccatytgacttctacctcccagtttgctctcccactcattagytctgggcagct

SEQ ID NO: 66 - DNA, 1128 bp, Homo sapiens
  misc feature (1009): n equals a,t,g, or c
  misc feature (1071): n equals a,t,g, or c
  misc feature (1075): n equals a,t,g, or c
  misc feature (1079): n equals a,t,g, or c
  misc feature (1085): n equals a,t,g, or c
tagtcttaagactagaatgctaaaaacaaaaacatgaaggaaattaaaaccccttattattaaattgatttgtaaaaacattgttactggaaatttattggacttgaggccttcctccagaaaataaggacttgattgtcaggcctatattaggttctgaaccttaatgccatgtatttgtacttactaaaaattgtttcaatgaaaagtacattagcagtatgaacttctggtccagttggaagtttttccatttgaaaaatgtgatgtttgcatggaactgtttgaaacttttttattttctagtccccctcccccacactggatagaatttagcctagaattttccctttggataaaagaacaaaaattgaacatgttatttgtaaattgatgtttagtaattagtgataaacttgaaatactagcatatattataagccttaatcttaggtagtcttatgaaaatgaatctcttaactatcttttgaacctgtattcacattggttttcaagatattttaagttatattttttcctcttttcagagctgcttcttattctggggctactttttttttwagttgtgtaattcacaaagggctgcatttttttttttttttaataaggcttataactatggctggatcttttgctctagtcttctaagaagggccattttattttttagagtcacttctaaagtcatgtggtaattaactttggagactgttttgcgtatgagtgctgatacaaattaaaacccaagtagacctcattgcatgtcaccctatgaatgttgacaatggaaggaataccttgcctgtagtatactgtcacttctggattgataagctgaggaagaaagttaagtttcttttttacataagtcagaaaaacttacagctggtgttcctagtttcctggttgacctcagcagatgaagtgaacagatagtgttaattcagattgaagaaattatctgaatcttgggttgtgtagatttacnatctacatgcatattaactaaaatccagatagcctttaccagtttccccatgggtacaaaanggtncccncccggncccttccaaaatcccattaggtaattgaaccttcctaaagggg

SEQ ID NO: 67 - DNA, 1028 bp, Homo sapiens
caggcccaagagttgaaggtgattggttttctttacagactccttgttctctagaagggctttttacttgaataaaacaatgcaacttagcaaaccaatttatggccttagagaaacatttttgcatgagttcttacaaactgtttgttatattttcctggaatgataagtgagaattatttagaaaagacatgctccaaaaaaaaaacaaaactgataaaacagtttttcgaaacttacttttaaaagcatacgtgctatgactctctccagtttgaatatgcmattgttttcacaggcaggatgtctgttttctgcctgtatttcccagtgatttactctagggtaaggtagtacacatttggttcagaaattaatttttatttctcctatatcttgttttatcaagattttgttgtggcatttcaatgtaaattataacaccatcatttgagtatacataattcaaaagaactacttgatgcagtatagtcttaagggttctgcatacattttagaaacatcttagccgtaagttaggtcctgtgttaaactgtttagtgctctgtttttaagaaaacaaatgttgaacctcacacttttatgtggtgacagtgtaatttaattaaaaggtgtaaatgttttcatctcttaggcttgctgtctcctaaggtcacccaagcagtggttggattttatacacattactactaaaataatactgaagttggataaggttatccttctgtatttgcgtctttcttgtgactaaccaccctgatatagtattaaccactgtgttcaagagtaaaaacaatatatgcaattttcattgaacttaaagagtgaaaaccatgtaaactattgaaactattgtaatccattaatgcttttttagaatggcagaccttgatgtttatttctcaaatggttaagccctcttctttactcttaatttttttttgagacagrgtcacccgggctgggagtgcagtgggtgaggattttgggctcactataacctcttc

SEQ ID NO: 68 - DNA, 2133 bp, Homo sapiens
ggcgcccggagccccgccatgtcgcgatccaaccggcagaaggagtacaaatgcggggacctggtgttcgccaagatgaagggctacccacactggccggcccggattgacgagatgcctgaggctgccgtgaaatcaacagccaacaaataccaagtcttttttttcgggacccacgagacggcattcctgggccccaaagacctcttcccttacgaggaatccaaggagaagtttggcaagcccaacaagaggaaagggttcagcgaggggctgtgggagatcgagaacaaccctactgtcaaggcttccggctatcagtcctcccagaaaaagagctgtgtggaagagcctgaaccagagcccgaagctgcagagggtgacggtgataagaaggggaatgcagagggcagcagcgacgaggaagggaagctggtcattgatgagccagccaaggagaagaacgagaaaggagcgttgaagaggagagcaggggacttgctggaggactctcctaaacgtcccaaggaggcagaaaaccctgaaggagaggagaaggaggcagccaccttggaggttgagaggccccttcctatggaggtggaaaagaatagcacccyctctgagcccggctctggccgggggcctccccaagaggaagaagaagaggaggatgaagaggaagaggctaccaaggaagatgctgaggccccaggcatcagagatcatgagagcctgtagccaccaatgtttcaagaggagcccccaccctgttcctgctgctgtctgggtgctactggggaaactggccatggcctgcaaactgggaacccctttcccaccccaacctgctctcctcttctactcacttttcccactccaagcccagcccatggagattgacctggatggggcaggccacctggctctcacctctaggtccccatactcctatgatctgagtcagagccatgtcttctccctggaatgagttgaggccactgtgttccttccgcttggagctattttccaggcttctgctggggcctgggacaactgctcccacctcctgacacccttctcccactctcctaggcattctggacctctgggttgggatcaggggtaggaatggaaaggatggagcatcaacagcagggtgggcttgtggggcctgggaggggcaatcctcaaatgcggggtgggggcagcacaggagggcggcctccttctgagctcctgtcccctgctacacctattatcccagctgcctagattcagggaaagtgggacagcttgtaggggaggggctcctttccataaatccttgatgattgacaacacccatttttccttttgccgaccccaagagttttgggagttgtagttaatcatcaagagaatttggggcttccaagttgttcgggccaaggacctgagacctgaagggttgactttacccatttgggtgggagtgttgagcatctgtccccctttagatctctgaagccacaaataggatgcttgggaagactcctagctgtcctttttcctctccacacagtgctcaaggccagcttatagtcatatatatcacccagacataaaggaaaagacacattttttaggaaatgtttttaataaaagaaaattacaaaaaaaaattttaaagacccctaaccctttgtgtgctctccattctgctccttccccatcgttgcccccatttctgaggtgcactgggaggctccccttctatttggggcttgatgactttctttttgtagctggggctttgatgttccttccagtgtcatttctcatccacataccctgacctggccccctcagtgttgtcaccagatctgatttgtaacccactgagaggacagagagaaataagtgccctctcccaccctcttcctactggtctctctatgcctctctacagtctcgtctcttttaccctggcccctctcccttgggctctgatgaaaaattgctgactgtagctttggaagtttagctctgagaaccgtagatgatttcagttctaggaaaataaaacccgttgattactaaaaaaaaaaaaaaaaaaaaactcgagggggggcccgtacccaatcgccctag

SEQ ID NO: 69 - DNA, 1636 bp, Homo sapiens
  misc feature (72): n equals a,t,g, or c
  misc feature (113): n equals a,t,g, or c
cacgtctctgtctctgggcctttgttcccctatatgcattgcaggcctgctccaccctcctcagcgcctganaatggaggtaaagtgtctggtctgggagctcgttaactatnctgggaaacggtccaaaagaatcagaatttgaggtgttttgttttcatttttatttcaagttggacagatcttggagttgccactgtagtatgccaaccaaatgagttcataatgccggacagcgccgtcgttggggacgtgctggtgttaaccaaaccgttaggaacccargttgctgtcaatgcccaccaatggctggataatcctgaaagatggaataaagtaaagatggtggtctccagagaagaggtggagctggcctatcaggaagccatgttcaatatggctaccctcaacagaactgctgcaggtttaatgcacacatttaatgcccatgcggccacagatatcacaggctttggcattctaggacactcccagaaccttgcaaaacaacaaagaaatgaagtgtcctttgttattcataatctgccaataattgccaagatggctgccgtcagcaaggccagtggacggtttgggcttcttcaaggaacctcagctgaaacctctgggggattactgatttgtctgccaagagaacaggcggctcgcttttgttctgaaatcaaatcctccaagtacggagagggtcaccaagcgtggatcgttggcattgtggaaaagggaaaccgaacggcccggatcattgacaagccgcgagttattgaagtcctgcctcgtggggccacagctgctgttcttgctcctgacagttcaaatgcctcctctgagcctagctcgtgagatgaaagaacagaagttgtttggaccttagagccattgtccacaatcacggatggttctcaagagttgattgtaagaaatttccaaagaaggctgcctgcatagtggttccggctgccctttctaggtgattggaatcagcccatctaaagcagtctttatatgcattccgaggccagagtaacattttgaactttggggggatatttgttcatcacttgggtagaagaggagcaaaaatacctctgttttctcttgccaaagtaagatgaagctattccaggttgagggatttttctttgcacggggttgattaatttctgcacagggagtgagattattaaagtaacacacacacaaagtaaattgcaaaatgaaaaaaattagaagcaaatgagttttggaccaatattgttgataaatctaaattgttaagagagatcttataatgcaacatcaaattctttattcaattttactgaagtactggctctttcctgctctggacaagaattgagcaacttgtctgatgactgggaaaggaggacctgcaaccatctgacttggtctctgttaatgacgtctctccctctaaaccccattaaggactgggagaggcagagcaagcctcagagcccaggcctcagtggtcattaagatgttaagtcttttgcggcagattcctggtgatttgatcaataaagagtaatttcttgctaaataaataaaagaaaccttgttgaaaaactaaaaaaaaaaaaaaaagggcggccgc

SEQ ID NO: 70 - DNA, 1465 bp, Homo sapiens
  misc feature (916): n equals a,t,g, or c
  misc feature (1459): n equals a,t,g, or c
aattccctcaccgtgtacatcaaaaacatctttctcaatcaagtcttggctgagatcaacaaggagattgaaggagtcactaaaacatctgaccctttgaagattctggccaacgcagacaccatgaaggtgctgggagtgcagggcctctcctacagagcacaatcattgtggagaagacagttcaagacctcctgaacctgatgcatgacttgagtgcatattcagatcaattcctcaacatggtgtgcgtraagytccaggagtacaaggacacctgcactgcagcttacaggggtattgtccagtcagaagaaaaacttgtcatcagtgcatcctgggcaaaagatgatgatatcagcagactcttgaaatctctaccaaactggatgaatatggctcaacccaaacagctgaggccaaaaagagaggaggaagaagatttcataagggcagcttttggcaaggagtctgaagttcttattgggaacctgggtgataaattaatccctccacaagacatccttcgtgacgtcagtgacctcaaagccttggccaacatgcatgaaagcctggaatggttggcaagtcgaacaaagtcagctttctccaatctttctacatcccagatgctttctcctgctcaagacagccacacgaacacggatctccccccagtgtcagagcagatcatgcagactctcagtgaacttgccaaatcgttccaggrtatggctgaccgctgcttgcttgtcttacatctggaagtgagggttcactgtttccactatcttatccctcttgcaaaggaggggaactatgccattgtggctaatgtggaaagtatggattatgaccccctggtggtcaagctcaacaaagatatcagcgccattgaagaggccatgagcgccanctttcagcagcacaagttccagtatatcttcgaaggcctgggccacctgatytcctgcatcctcattaatggtgcccagtacttcaggcgcatcagtgagtctggcatcaagaaaatgtgtaggaacatttttrttcttcagcagaatttgaccaacatcaccatgtcgcgggaggcagacctggactttgcaaggcagtactacgagatgctttacaacacagctgacgagctcctgaacctggtggtggaccagggtgtgaagtacacggagctggagtacatccacgctctgaccctgctgcaccgcagccaaactggggtgggggaactgaccacccagaacacgaggctgcagaggctcaaagagatcatctgcgagcaggctgccatcaagcaagccaccaaggacaagaagataactaccgtttagcagggcgtactgcggttggtgacgggggtccccttcagtcacactcacttttttccttggtatgttattgagtatattctgagcttagttttctctacagtgatatttantggaga

SEQ ID NO: 71 - DNA, 1772 bp, Homo sapiens
  misc feature (4): n equals a,t,g, or c
  misc feature (6): n equals a,t,g, or c
  misc feature (1728): n equals a,t,g, or c
  misc feature (1752): n equals a,t,g, or c
  misc feature (1756): n equals a,t,g, or c
ttananccgggctgcaggaattcggcacgagggattgcaccaaattatccaagtgtattaggagactggggcttttttctttaatcccttcttattaatgaagtgcatagtgctgctcccaggagaccactgctgacagatacacagagaagagatcagagaggaaaaactgggaagacataaatgaattatacccagccatgaaacaatgccaactgtctcttccctaaggaagagtacaagtaccctaaaattgaaaggtggtccctacactgaaaacgcacatagtttgtcaaaagtgtacaaaagggaaagagtcttattttaagctttcaggctttcttaaaaacttggggaccagaatttcaatgtatgtttccattgttgaagataacattttcttcaaagagccttaaccttttgtactggaaggaaatattttctggacttaagtagttgcctaaatttaagattcctacactttatttctgccattgatgcttttcctaaacccttatactatctttttattatctgagccttttcctaatgcagctcataggtgctagctagagctgctgctcagtattgaagactttacaaggagattagaaatctttggaaaacatatgtgatgaaattgagctatatgatttatcagagatctgattccaaagagcacagaatactgttctcagaccatgaaaccagacaacacatgtattggtttaaactcgataatgacaggaaaattccaaactagagcagtaaattcaaatggtaagatgaatcctagaaggcctctgattgcagcatgttgacaccaacctcacgttacgaacaattcacagagaatttgcctttgtggcaactgaagatggaagtctggggggcacagacaaccttatcaaacaatataaaagccaatataaattctcataagcactatagaatttgcaaattcagaacattttatacctaaaagtaattctgtctttcctaaagtgtttttaacatgaaaattagtaggaagatgtggttactatttggaaagtgtaatgtaacaaaactctcttttgttaccacaaattttgtgagtttagtactctacagattgccccataagagcagtagcttttgaaactcataattctctgaaataaatgaaagacatttaattcaaggatcaaaaattgtggccatctttgcaaatgactacctatagcctgtgaaaatacatttcaaaaaatgttatgtgcaatgaacactaaatttaagagcagttacagtgtgactcactcatgtttaaaaaaaatcgaagagctaaaaaatacgtctaatttatgtaacccattggaatgtatttctaggttctcttcaggattaattaaataaacatgcaatttatgaaaacatataaacaattatttatcacttttatgacccaaatcacaataaaattgtcatttaggataaactggggagaatagactgaacatatggttatattcacagttatttattaacttaaatgttattccaacattagagctaatgttaaaaagatttaaactgtaacgtctaatatttggaataatatattaaagtattagcactgtggttgattttcttgaattatgttgcatcttgtactactaagcttgtgaaaataaacatttggatgttttaaaaggtaaaaaaaaaaaaaactcggggggggcccggganccaaatcgccccaaaggggggcgnatanaattcccgggccgggg

SEQ ID NO: 72 - DNA, 1163 bp, Homo sapiens
  misc feature (433): n equals a,t,g, or c
  misc feature (1163): n equals a,t,g, or c
tggtctctaatatttcaaacaggagctccctttagcgagtccttcttttcctgactgcagctcttttcattttgccatccttttccagctccatgatggttctgcaggtttctgcggccccccggacagtggctctgacggcgttactgatggtgctgctcacatctgtggtccagggcagggccactccagagaattaccttttccagggacggcaggaatgctacgcgtttaatgggacacagcgcttcctggagagatacatctacaaccgggaggagttcgygcgcttcgacagcgacgtgggggagttccgggcggtgacggagctggggcggcctgmtgmggagtactggaacagccagaaggacatcctggaggagaagcgggcagtgccggacaggatgtgcagacacaactacgagctggrcgnggcccrtgaccctgcagcgccgagtccagcctarggtgaaygtttccccctccaagaaggggcccytgcagcaccacaacctgcttgtctgccacgtgacrgatttctacccaggcagcattcaagtccgatggttcctgaatggacaggaggaaacagctggggtcgtgtccaccaacctgatccgtaatggagactggaccttccagatcctggtgatgctggaaatgaccccccagcagggagaygtctacayctgccaagtggagcacaccagcctggayagtcctgtcaccgtggagtggaaggcacagtctgattctgcccggagtaagacattgacgggagctgggggcttcgtgctggggctcatcatctgtggagtgggcatcttcatgcacaggaggagcaagaaagttcaacgaggatctgcataaacagggttcctgasctcacygaaaagactawtgtgccttaggamaagcatttgctgtgtttygttagcayctggytccaggacagaccytcarcttccmaakwggatactgctgccaagaagttgctctgaagtcagtttctatcrttctgctctttgattcaaagcactgtttctctcactgggcctccaaccatgttcccttcttcttagcaccacaaataatcaaaacccaamaaaaaaaaaaaaaaaaaaaaaaaaaaaaaaaaaaaaaaaaaaaaaaaaaaaaaaaan

SEQ ID NO: 73 - DNA, 2922 bp, Homo sapiens
  misc feature (2): n equals a,t,g, or c
  misc feature (10): n equals a,t,g, or c
  misc feature (50): n equals a,t,g, or c
  misc feature (2884): n equals a,t,g, or c
  misc feature (2903): n equals a,t,g, or c
gnctccaccnggtggcggcccgctgctagcaactagtggatcccccgggncgctggtaggccttggagaggcgggttaggaagagtggagactgctgcacggactctggaaccatgaacatatttgatcgaaagatcaactttgatgcgcttttaaaattttctcatataaccccgtcaacgcagcagcacctgaagaaggtctatgcaagttttgccctttgtatgtttgtggcggctgcaggggcctatgtccatatggtcactcatttcattcaggctggcctgctgtctgccttgggctccctgatattgatgatttggctgatggcaacacctcatagccatgaaactgaacagaaaagactgggacttcttgctggatttgcattccttacaggagttggcctgggccctgccctggagttttgtattgctgtcaaccccagcatccttcccactgctttcatgggcacggcaatgatctttacctgcttcaccctcagtgcactctatgccaggcgccgtagctacctctttctgggaggtatcttgatgtcagccctgagcttgttgcttttgtcttccctggggaatgttttctttggatccatttggcttttccaggcaaacctgtatgtgggactggtggtcatgtgtggcttcgtcctttttgatactcaactcattattgaaaaggccgaacatggagatcaagattatatctggcactgcattgatctcttcttagatttcattactgtcttcagaaaactcatgatgatcctggccatgaatgaaaaggataagaagaaagagaagaaatgaagtgaccatccagcctttcccaattagacttcctctccttccacccctcatttcctttttgcacacattacaggtggtgtgttctgtgataatgaaaagcatcagaaaagcttttgtactttgtggtttcctctattttgaattttttgatcaaaaaactgattagcagaatatagtttggagtttggcttcatcttcctggggttcccctcactcccttttttgtcaaccccatctgtagcctcttcctctactcaggcagtcgacccgccacgatgagaagtgggaccagcagagggcgccaacttcaggagtccgctttcccaccaggcttcattcacccagtggacctgaactgtttggtagagccacccggcccttccttcctcattgttgtttggtatgcgcacagttcctgtgggactgggccgtgagttttccattggaaagaagttcagtggtcccattgttaactcagcctcaaatctcaactgtcaggccctacaaagaaaatggagagcctcttctggtggatgctttgctccctctgagctgcccatgctggtctggcaaacacacctttctgctttgccttcacaaaagtaatgtgttccctttcccaccccttgcctgaccctcagggagtcagcctgcttccatccatgggtgggaagacttcagcacaaaggaaagactaattcttgtcaggcatttttgaaaaggctgattatgtgtatcaaggtacagcatcgtagggttcccctaaacttgccctgtttttgtttttttagtttgttatccccttactgagcggcctctactaggtggctgtgattaaatgtcccaagcaaggatagggaaggggaatggttgagcctctggagatcattgtaaccaatcctgccagacctgtttggggcagtggggagcaaacctagataaggacctgtttggggcagcagggagcaaaatctcctttaacaaccaagcagttcctcattcacatcaacagagcgaggctgtgataacttaggaggcagcaatcctaatagtccttcagtgcattttagtctgtctccaactggacaccagtaggtagtgtcaagccagagattcggggcagtagataaatgttcattttactgatgcactttagtttttggtctgttacctgttttccagaaatttgtggccttttaggcgggagttaggcgaccaaaccagtgagagccccaatccctgcagttttgtggcttcaagtgtgggtggacagtcctaatggggatctccagctccttcctgtgggctgccacagacagctacccccagaagggtcaatgttgggagtggttgtggctctgagctgctctacagagcttcagtgtgagaggatcgagccattgaaagctcattaccagtaggacataatttttggctctccctattcacaaccagtgcacagtttgacacagtggcctcaggttcacagtgcaccatgtcactgtgctatcctacgaaatcatttgtttctaagttgtgtttattcctggagtgacatgccaccccgaatggctcactttcactgaggatgctgtcctctgatttagctgctgcctccagcctctggcttgagaacttactaaaggcacttccttcctgttaaacccctgttaactctccataaatttggtgattctctgctaggcctaagattttgagttaacatctcttgaagccaaactccaccttctgtgctttttgcttgggataatggagtttttctttagaaacagtgccaagaatgacaagatattaaaaaaaaaaaagaaagaaaaaaaaaaaaacacctacttttaaagaaaatacctaacagatttttaatatagttatctctaccactttcttttctagtttcttgattttcagctcaggctgcattctaactcatactgtgaagacaaaggtgtttttgattcagaaatatatgaaatctgcatagtcttaatttgtaaaaaataaagaaaattccttaacctttaaaaaaaaaaaaaaaaccnggsgggccgstctagaggnatcccaagcttacgtaagg

SEQ ID NO: 74 - DNA, 1578 bp, Homo sapiens
  misc feature (267): n equals a,t,g, or c
ggagcggacgrcggcgggcgcactagcrggtcggccgcggagmgaggtgcagctcggcttcccccggcacccctccccctcgggcgccagccmacccctccgccggccgggccgaccccgccgtactatcccctgcggcgcgagccggggcggctccaagcgccccccagcagacccccatcatgggcagccagagctccaaggctccccggggcgacgtgaccgccgaggaggcagcaggcgcttcccccgcgaaggccaacggcnaggagaatggccacgtgaaaagcaatggagacttatcccccaagggtgaaggggagtcgccccctgtgaacggaacagatgaggcagccggggccactggcgatgccatcgagccagcaccccctagccagggtgctgaggccaagggggaggtcccccccaaggagacccccaagaagaagaagaaattctctttcaagaagcctttcaaattgagcggcctgtccttcaagagaaatcggaaggagggtgggggtgattcttctgcctcctcacccacagaggaagagcaggagcagggggagatcggtgcctgcagcgacgagggcactgctcaggaagggaaggccgcagccacccctgagagccaggaaccccaggccaagggggcagaggctagtgcagcctcagaagaagaggcagggccccaggctacagagccatccactccctcggggccggagagtggccctacaccagccagcgctgagcagaatgagtagctaggtaggggcaggtgggtgatctctaagctgcaaaaactgtgctgtccttgtgaggtcactgcctggacctggtgccctggctgccttcctgtgcccagaaaggaaggggctattgcctcctcccagccacgttccctttcctcctctccctcctgtggattctcccatcagccatctggttctcctcttaaggccagttgaagatggtcccttacagcttcccaagttaggttagtgatgtgaaatgctcctgtccctggccctacctccttccctgtccccacccctgcataaggcagttgttggttttcttccccaattcttttccaagtaggttttgtttaccctactccccaaatccctgagccagaagtggggtgcttatactcccaaaccttgagtgtccagccttcccctgttgtttttagtctcttgtgctgtgcctagtggcacctgggctggggaggacactgccccgtctaggtttttataaatgtcttactcaagttcaaacctccagcctgtgaatcaactgtgtctcttttttgacttggtaagcaagtattaggctttggggtggggggaggtctgtaatgtgaaacaacttcttgtctttttttctcccactgttgtaaataacttttaatggccaaaccccagatttgtactttttttttttttctaactgctaaaaccattctcttccacctggttttactgtaacatttggaaaaggaataaatgtcgtccctttaaaaaaaaaaaaaaagggcggccgctctagaggagccaggctgagtaggcg

SEQ ID NO: 75 - DNA, 3233 bp, Homo sapiens
  misc feature (1088): n equals a,t,g, or c
  misc feature (2749): n equals a,t,g, or c
  misc feature (3201): n equals a,t,g, or c
aaggcatgcctggactcaaagggagacccgggtttccagggagcaaargcraakgytggatttttcggaatacccggtctgaagggtctggctggtgagccaggttttaaaggcagccgaggggaccctgggcccccaggaccacctcctgtcatcctgccaggaatgaaagacattaaaggagagaaaggagatgaagggcctatggggctgaaaggatacctgggcgcaaaaggtatccaaggaatgccaggcatcccagggctgtcaggaatccctgggctgcctgggaggcccggccacatcaaaggagtcaagggagacatcggagtccccggcatccccggtttgccaggattccctggggtggctggcccccctggaattacgggattcccaggattcataggaagccggggtgacaaaggtgccccagggagagcaggcctgtatggcgagattggcgcgactggtgatttcggtgacatcggggacactataaatttaccaggaagaccaggcctgaagggggagcggggcaccactggaataccaggtctgaagggattctttggagagaagggaacagaaggtgacatcggcttccctgggataacaggcgtgactggagtccaaggccctcctggacttaaaggacaaacaggctttccagggctgactgggcctccagggtcgcagggagagctggggcggattggactgcctggtggcaaaggagatgatggctggccgggagctccgggcttaccaggttttccgggactccgtgggatccgcggcttacacggcttgccaggcaccaagggctttccaggatccccaggttctgacatccacggagacccaggcttcccaggccctcctggggaaagaggtgacccaggagaggccaacacccttccaggccctgtgggagtcccaggacagaaaggagaccaaggagctccaggggaacgaggcccacctgggagcccaggacttcaggggttcccaggcatcacacccccttccaacatctctggggcacctggtgacaaaggggcgccagggatatttggcctgaaagnttatcggggcccaccagggcaccaggttctgctgctcttcctggaagcaaaggtgacacagggaacccaggagctccaggaaccccagggaccaaaggatgggccggggactccgggccccagggcaggcctggtgtgtttggtctcccaggagaaaaagggcccaggggtgaacaaggcttcatggggaacactggacccaccggggcrgtgggcgacagaggccccaagggacccaagggagacccaggattccctggtgcccccgggactgtgggagcccccgggattgcaggaatcccccagaagattgccgtccaaccagggacagtgggtccccaggggaggcgaggcccccctggggcaccgggggagatggggccccagggcccccccggagaaccaggttttcgtggggctccagggaaagctgggccccaaggaagaggtggtgtgtctgctgttcccggcttccggggagatgaaggacccataggccaccaggggccgattggccaagaaggtgcaccaggccgtccagggagcccgggcctgccgggtatgccaggccgcagcgtcagcatcggctacctcctggtgaagcacagccagacggaccaggagcccatgtgcccggtgggcatgaacaaactctggagtggatacagcctgctgtacttcgagggccaggagaaggcgcacaaccaggacctggggctggcgggctcctgcctggcgcggttcagcaccatgcccttcctgtactgcaaccctggtgatgtctgctactatgccagccggaacgacaagtcctactggctctctaccactgcgccgctgcccatgatgcccgtggccgaggacgagatcaagccctacatcagccgctgttctgtgtgtgaggccccggccatcgccatcgcggtccacagtcaggatgtctccatcccacactgcccagctgggtggcggagtttgtggatcggatattccttcctcatgcacacggcggcgggagacgaaggcggtggccaatcactggtgtcaccgggcagctgtctagaggacttccgcgccacaccattcatcgaatgcaatggaggccgcggcacctgccactactacgccaacaagtacagcttctggctgaccaccattcccgagcagagcttccagggctcgccctccgccgacacgctcaaggccggcctcatccgcacacacatcagccgctgccaggtgtgcatgaagaacctgtgagccggcgcgtgccaggaagggccattttggtgcttattcttaacttattacctcaggtgccaacccaaaaattggytttatttttttcttaaaaaaaaaaaagtctaccaaaggaatttgcatccagcagcagcacttagacctgccagccactgtcaccgagcgggtgcaagcactcggggtccctggagggcaagccctgcccacagaaagccaggagcagccctggcccccatcagccctgctagacgcaccgcctgaaggcacagctaaccacttcgcacacacccatgtaaccactgcactttccaatgccacagacaactcacattgttcaactcccttctcggggtgggacagacgagacaacagcacacaggcagccagccgtggccagaggntcgaggggctcaggggctcaggcacccgtccccacacgagggccccgtgggtgggcctggccctgctttctacgccaatgttatgccagctccatgttctcccaaataccgttgatgtgaattattttaaaggcaaaacygtgctctttattttaaaaaacactgataatcacactgcggtaggtcattcttttgccacatccctatagaccactgggtttggcaaaactcaggcagaagtggagacctttctagacatcattgtcagccttgctacttgaaggtacaccccatagggtcggaggtgctgtccccactgccccacsttgtccctgagatttaacccctccactgctgggggtgagctgtactcttctgactgccccctcctgtgtaacgactacaaaataaaacttggttctgaatatttttaaaaaaaaaaaaaaaaaaanaaaaaaaaaaaaaaaaagcaaaacaaaaaggg

SEQ ID NO: 76 - DNA, 1670 bp, Homo sapiens
  misc feature (26): n equals a,t,g, or c
cttttaaaattgatcacaacgagggnaaacaaaataaaattagggggcaaagggtaggagtatggggggaggggagagcaaacctatcgaatatatcttagaattttgctcagaaatcactgctgcctctcaagtgttgcattgtccctgcctaaaccaagaaggctaaacaaagcccctcctgtttgaattcttaaggtaagaaatttctaagctaagaaaacactattgcctaaaaccaatgatagtggagctcatttacaaataggcatgcctcacacacacagtccaaaggcaagacactggctttgaaattaggctcatgatgtgattcctattatatgtacctgatttttttaggccccaggtatgtggaccagagttaatgtcatgactcttcaaagatatgatgaaaagttgccctagaaatctagagatgcatgtttatttaattccatagtttaaaaaaaaatttaagcaggtagttgtggcttatctgggggcaaaataatatatgtgaaattgcttccagaggacaaagtatattttctaaagtcctgaaataggatcatgaacccttctgaagttttggtttgaaatattatagtatatgatattaccaaagagcccttaattcagagtttaaggggctctcttcctgaactctcttcatcactcagggttgaatgtgtaatgttccttgctattgattgttattgttgattcttaggatcaggccaagaatcatctggaaaacattatcttaattccgtctctcatatcctaaacagtacattttactaagaaattccatatgaaaaactccactcatgtctcctgagattatcctgtaagtgaagtagctttcatttaaccaagctaaattatttccatttagccatgttaaagagaagccaagtctagagaaagcaatcctgtaacccatgaatctggtgtacccattttcccttaacgtaacgggaagtgttttgaaattcccagaagagagctgttttgtaatcaaagtgatggattataagaaagccagactttggaaaaggataattggaataaagggaggtgcttgaagattttccaaactactttatgtcatttagcttctattttctgaagggctttctttggtgccatgtactcagatcagtcagttgactgaaagatgatcatgttttcttcgtaaagatttaagcaattggcaactacaaagacattattttcttactgttctatatcatgtactgttgctgacattacaaaaagggtctggaagggaaaccgtgtcactgttttatcttttttctttaaaatacaaaagtatcccaactaatcatttattatggtcagcttgttttacatgtcccctatsatgagaaatgctatcaacatctgtgatttctaagagtcttaccaaattgttactttaattcttgtgtcctgctgagtggtttttcttttaaaataccatttttatcaccctgtggcactgggtgtgttactgcgattacactgatgattctgagctgtgcttcttcaagtagctcagktcttgcgttttatattaggtaacagttttgtgatgcttttgtgcrttctttgtcatctcttctgagttttcgaatctgtcataaataaactttttcactatgcaa

SEQ ID NO: 77 - DNA, 1177 bp, Homo sapiens
  misc feature (1155): n equals a,t,g, or c
ccaaggtcgccgacaggagaatggctgccgcgagactctgagtgccacctctgcatgtccgtgaccacccaggccgggaacagcagcgagcaggccataccacaggcaatgctccaggcctgtkttggctcctggctggacagggaaaagtgcaagcaatttktggagcagcacacgccccagctgctgaccctggtgcccaggggctgggatgcccacaccacctgccaggccctcggggtgtgtgggaccatgtccagccctctccagtgtatccacagccccgacctttgatgagaactcagctgtccagctgcaaaggaaaagccaagtgagacgggctctgggaccatggtgaccaggctcttcccctgctccctggccctcgccagctgccaggctgaaaagaagcctcagctcccacaccgccctcctcaccgcccttcctcggsagtcacttccactggtggaccacgggcccccagccctgtgtcggccttgtctgtctcagctcaaccacagtctgacaccagagcccacttccatcctctctggtgtgaggcacagcgagggcagcatctggaggagctctgcagcctccacacctaccacgacctcccagggctgggctcaggaaaaaccagccactgctttacaggacagggggttgaagctgagccccgcctcacacccacccccatgcactcaaagattggattttacagctacttgcaattcaaaattcagaagaataaaaaatgggaacatacagaactctaaaagatagacatcagaaattgttaagttaagctttttcaaaaaatcagcaattccccagcgtagtcaagggtggacactgcacgctctggcatgatgggatggcgaccgggcaagctttcttcctcgagatgctctgctgcttgagagctattgctttgttaagatataaaaaggggtttctttttgtctttctgtaaggtggacttccagcttttgattgaaagtcctagggtgattctatttctgctgtgatttatctgctgaaagctcagctggggttgtgcaagctagggacccattcctgtgtaatacaatgtctgcaccartgctaataaagtcctattctcttttatgagaaaaaaaaamacccttccntttaaagtgcctgcagttttgg

SEQ ID NO: 78 - DNA, 829 bp, Homo sapiens
  misc feature (685): n equals a,t,g, or c
  misc feature (822): n equals a,t,g, or c
  misc feature (825): n equals a,t,g, or c
ggcacgagggggtgggatgggtggggggtaacgggggaaactggggaagtggggaaccgaggggcaaccaggggaagatggggtgctggaggagagcttgtgggagccaaggagcaccttggacatctggagtctggcaggagtgatgacgggtggaggggctagctcgaggcagggctggtggggcctgaggccagtgaggagtgtggagtaggcgcccaggcatcgtgcagacagggcgacatcagctggggacgatgggcctgagctagggctggaaagaagggggagccaggcattcatcccggtcacttttggttacaggacgtggcagctggttggacgaggggagctggtgggcagggtttgatcccagggcctgggcaacggaggtgtagctggcagcagcgggcaggtgaggaccccatctgccgggcaggtgagtcccttccctccccaggcctcgcttccccagccttctgaaagaaggaggtttaggggatcgagggctggcggggagaagcagacaccctcccagcagaggggcaggatgggggcaggagagttagcaaaggtgacatcttctcggggggagccgagactgcgcaaggctggggggttatgggcccgttccaggcagaaagagcaagagggcagggagggagcacaggggtggccagcgtanggtccagcttgccaccttcacccaccgcaatttcattttagttagcaaggcacaagggcagcttccggcacggctttcttcaagccttattgcccggagccttcgaaggctttgaagaaccggggaagacaaggcanttncttc

SEQ ID NO: 79 - DNA, 1143 bp, Homo sapiens
  misc feature (1126): n equals a,t,g, or c
ggcacgagagcggacagatctctgggtgctgggcggtcatggcgctactagatgtatgcggascccccgagggcagcggccggaatcggctctcccggttgcgggaagcgggcgtcgctcggacccaggacactacagtttctctatgcgatctccagagctcgctttaccccggggaatgcagcccacagaattcttccagtccctgggtggggacggagaaaggaacgttcagattgagatggcccatggcaccaccacgctcgccttcaagttccagcatggagtgattgcagcagtggattctcgggcctcagctgggtcctacattagtgccttacgggtgaacaaggtgattgagattaacccttacctgcttggcaccatgtctggctgtgcagcagactgtcagtactgggagcgcctgctggccaaggaatgcaggctgtactatctgcgaaatggagaacgtatttcagtgtcggcagcctccaagctgctgtccaacatgatgtgccagtaccggggcatgggcctctctatgggcagtatgatctgtggctgggataagaagggtcctggactctactacgtggatgaacatgggactcggctctcaggaaatatgttctccacgggtagtgggaacacttatgcctacggggtcatggacagtggctatcggcctaatcttagccctgaagaggcctatgaccttggccgcaggctattgcttatgccactcacagagacagctattctggaggcgttgtcaatatgtaccacatgaaggaagatggttgggtgaaagtagaaagtacagatgtcagtgacctgctgcaccagtaccgggaagccaatcaataatggtggtggtggcagctgggcaggtctcctctgggaggtcttggccgactcagggacctaagccacgttaagtccaaggagaagaagaggcctagcctgagccaaagagagagtacgggctcagcagccagaggaggccggtgaagtgcatcttctgcgtgttctctatttgaacaagcatttcccccagggaagtttctgggtgccccactaagtagaataaagaaaaacggttataaataaaaaaaaaaaaaaaaanccggggggggcccggta

SEQ ID NO: 80 - DNA, 1226 bp, Homo sapiens
  misc feature (1223): n equals a,t,g, or c
atggatgtgagagaccacattgcctctcccactgctttggggagcactttcctgtcatttctaacttaccacatgcttggtgtactatatgtaykwtgtgcctcatatgttgcaaagaactaaggtgagtatagcctactagatatgggcaatatccagcctagatgattggaaagataccagtttaagtaaacttggtaaaatccaagtctttttttttttttttccaggaacaactacattttctcatatacaggtagctaggggcaacacagttccattctagagggaaacaaaagggagagccccacaaaactttggggacaagggagagagagactcatctgacacttcttttggaggtcaggatttgtatatcagaattgaagttagaattaagtgaattaaactgaatttgattgtgagtgaacctagaacagcactgaagtattacataacctggaagactgagaagggtatattatttgarggatctttttatttccccgaggtctttcgcactggagacagcataaaagagtgaacaaatgttgggatgagagaagatgacatcaatgtgggagttcagtataactggggataaactagaagaacctgtgattttacagtcatcttattacctgccagggctcatctagccatggcaatgtttgccttgaatgggggtgaaagcctttctttgttggatcaaatactactacactattacacttccacactatttatttggggatgggctgggagtgacagtagcctagtagttcagctacctgattactgccccattcttttagaagcacatgtctgccaaggagtggtttgtactgctgtgtttggtacatctagtcttttttctgctataagttttccttacctgtcctttagtgtagattttattcatcacaggacagaataatcaaggacaaccaaaatccttttgttagtttcagtacctcagctatcaacatttctgagctaccattcaatgttcctctgtgtcatggagtgaaattcttgttttgtgggtattaggagtgtgggaatgtgataacctaaacaacctttgctctgaaattccatttttccctctttccctgagttgtattgacctacagagttaatttcctttgtatttttttaagaaaatattaaaaatcaacggtctcaaaaaaaaaaaaaaaaaaaaaaaaaaaaaaaaaaancct

SEQ ID NO: 81 - DNA, 574 bp, Homo sapiens
  misc feature (359): n equals a,t,g, or c
tttagagaaagaagaatatgcaacagaaactgtatgtagcctgcaaagcctaaaatgtttactctctggcttgggagtttgtctcccctgctctagactgtcagcaagtggtacagtggtacagtacagtggtactgcccaactgcacttctctgcaaggtgattctagtgtgcacttgtcagaatgaaaatatgttattcatttaagacatctcatgtctttgaatgtaatcacatgatttgtatttaatatttacatgacctaattattttttcacgtcagtttttctarattggcaatagcctgttgcaaagtgcctaaacctttgagraaaattactatgarcaaggtccatgantttagttttccaatataaagggaattccmttctatactgtaaatccaaaaatgctagttgccctcagcttttgagttgacttccagaaagttgaratcttttgaccattttttctcatgtcatataaaatgtgccacatggttarttgtcaagctgtggtagtcatgtacactttkkkkcttttttttaactttctaaaargaaaagttcaaagt

SEQ ID NO: 82 - DNA, 2043 bp, Homo sapiens
  misc feature (1980): n equals a,t,g, or c
  misc feature (1982): n equals a,t,g, or c
  misc feature (2043): n equals a,t,g, or c
tcggagctgctctggctgcgcgcggagcgggctccggagggaagtcccgagacaaagggaagcgccgccgccgccgccccgctcggtcctccacctgtccgctacgctcgccggggctgcggccgcccgagggactttgaacatgtcggggatcgccctcagcagactcgcccaggagaggaaagcatggaggaaagaccacccatttggtttcgtggctgtcccaacaaaaaatcccgatggcacgatgaacctcatgaactgggagtgcgccattccaggaaagaaagggactccgtgggaaggaggcttgtttaaactacggatgcttttcaaagatgattatccatcttcgccaccaaaatgtaaattcgaaccaccattatttcacccgaatgtgtacccttcggggacagtgtgcctgtccatcttagaggaggacaaggactggaggccagccatcacaatcaaacagatcctattaggaatacaggaacttctaaatgaaccaaatatccaagacccagctcaagcagaggcctacacgatttactgccaaaacagagtggagtacgagaaaagggtccgagcacaagccaagaagtttgcgccctcataagcagcgaccttgtggcatcgtcagaaggaagggattggtttggcaagaacttgtttacaacatttttgcaaatctaaagttgctccatacaatgactagtcacctgggggggttgggcgggcgccatcttccattgccgccgcgggtgtgcggtctcgattcgctgaattgcccgtttccatacagggtctcttccttcggtcttttgtatttttgattgttatgtaaaactcgcttttattttaatattgatgtcagtatttcaactgctgtaaaattataaacttttatacttgggtaagtcccccaggggcgagttcctcgctctgggatgcaggcatgcttctcaccgtgcagagctgcacttggcctcagctggctgtatggaaatgcaccctccctcctgccgctcctctctagaaccttctagaacctgggctgtgctgcttttgagcctcagaccccagggcagcatctcggttctgcgccacttcctttgtgtttatatggcgttttgtctgtgttgctgtttagagtaaataaactgtttatataaaggttttggttgcattattatcattgaaagtgagaggaggcggcctcccagtgcccggccctccccacccacctgcagccccaccgcgggccaggaccaggctctccatctgcttcggatgcacgcaggctgtgaggctctgtcttgccctggatctttgtaaacagggctgtgtacaaagtgctgctgaggtttctgtgctccccgcatcttcgggctgtagagcgctgggcagctaagatctgcataggtcgggattggcatcgagaccctggcaactgcaccggtgccagctgtcttgggggccacaaggccaggtccagaccagggctgggggctgcctgaggactcctatccgggcagcctgctggcggggkttcccctcttcagtggccaggtcacagggatggagctgcgctgtgcatagggtgccacctcrggtgtctgtcccttgtgtcctcaggaggcagccttgctaccacccgtkgcaaacgccaggtgctttttctgggagagcccacagccgtggccctccaggcttccccgacccttagcgccaggtggagggccctgggcagcctgtgtctggaattcttcgtcctgaggccgcctgagtgtggtctgtcctggggaggctgtgcgcctcagcarccgtcctgacgctgagccctctkcaaaggttkggccggccargcttcttggggctgcctgagccactgcaggaagtggcctggctgggaagttgggtgccggtcaactcccagcaggaaggcacagtggacagagatgggaagccctgggggananagcccggtgctcccagccctcaaaactttgggtcccaacccattttccccatcctagcgan

SEQ ID NO: 83 - DNA, 1056 bp, Homo sapiens
  misc feature (928): n equals a,t,g, or c
  misc feature (941): n equals a,t,g, or c
  misc feature (997): n equals a,t,g, or c
  misc feature (1044): n equals a,t,g, or c
aattcggcagagcccgattgatagaagacaatgagtacacagcaagacaaggtgcaaagttccccatcaagtggacggcccccgaggcagccctgtacgggaggttcacaatcaagtctgacgtgtggtcttttggaatcttactcacagagctggtcaccaaaggaagagtgccatacccaggcatgaacaaccgggaggtgctggagcaggtggagcgaggctacaggatgccctgcccgcagactgccccatctctctgcatgagctcatgatccactgctggaaaaaggaccctgaagaacgccccacttttgagtacttgcagagcttcctggaagactactttaccgcgacagagccccagtaccaacctggtgaaaacctgtaaggcccgggtctgcggagagaggccttgtcccagaggctgccccacccctccccattagctttcaattccgtagccagctgctccccagcagcggaaccgcccaggatcagattgcatgtgactctgaagctgacgaacttccatggccctcattaatgacacttgtccccaaatccgaacctcctctgtgaagcattcgagacagaaccttgttatttctcagactttggaaaatgcattgtatcgatgttatgtaaaaggccaaacctctgttcagtgtaaatagttactccagtgccaacaatcctagtgctttccttttttaaaaatgcaaatcctatgtgattttaactctgtcttcacctgattcaactaaaaaaaaaaaagtattattttccaaaagtggcctctttgtctaaaacaataaaattttttttcatgttttaacaaaaaccaawmaggacaggtgtttgtttttgttttcttttttataaatatggaatatatataatatatatgtccctggtacatatacangtgggggtgctangtgggagactgtgggccgggcctggggccacccaggctgcgggggcccagaggggnggggtttttactggcaaggtcaggccttcaaggcacccggtggtttnttcttggaaaac

SEQ ID NO: 84 - DNA, 2099 bp, Homo sapiens
  misc feature (1846): n equals a,t,g, or c
catttccggtgggggcgccgcgccagtgagggcccggaagtgggtcgcgcggagattgctgggcggttcttgccggaagcggagagcggctgatcgcagtccggaggtgaggcggaactctgagcgtggtccattatggctgacatgcaaaatctggtagaaagattggagagggcagtgggccgcctggaggcagtatctcatacctctgacatgcaccgtgggtatgcagacagtccttcaaaagcaggagcagctccatatgtgcaggcatttgactcgctgcttgctggtcctgtggcagagtacttgaagatcagtaaagagattgggggagacgtgcagaaacatgcggagatggtccacacaggtttgaagttggagcgagctctgttggttacagcttctcagtgtcaacagccagcagaaaataagctttccgatttgttggcacccatctcagagcagatcaaagaagtgataacctttcgggagaagaaccgaggcagcaagttgtttaatcacctgtcagctgtcagcgaaagtatccaggccctgggctgggtggctatggctcccaagcctggcccttatgtgaaagaaatgaatgatgccgccatgttttatacaaaccgagtcctcaaagagtacaaagatgtggataagaagcatgtagactgggtcaaagcttatttaagtatatggacagagctgcaggcttacattaaggagttccataccaccggactggcctggagcaaaacggggcctgtggcaaaagaactgagcggactgccatctggaccctctgccggatcaggtcctcctccccctccaccaggcccccctcctcccccagtctctaccagttcaggctcagatgagtctgcttcccgctcagcactgttcgcgcagattaatcagggggagagcattacacatgccctgaaacatgtatctgatgacatgaagactcacaagaaccctgccctgaaggctcagagtggtccagtacgcagtggccccaaaccattctctgcacctaaaccccaaaccagcccatcccccaaacgagccacaaagaaggagccagctgtacttgaactggagggcaagaagtggagagtggaaaatcaggaaaatgtttccaacctggtgattgaggacacagagctgaaacaggtggcttacatatacaagtgtgtcaacacgacattgcaaatcaagggcaaaattaactccattacagtagataactgtaagaaacttggcctggtattcgatgacgtggtgggcattgtggagataatcaacagtaaggatgtcaaagttcaggtaatgggtaaagtgccaaccatatccatcaacaaaacagatggctgccatgcttacctgagcaagaattccctggattgtgaaatagtcagtgccaaatcttccgagatgaatgtcctcattcctacagaaggcggtgactttaatgaattcccagttcctgagcagttcaagaccctatggaacgggcagaagttggtcaccacagtgacagaaattgctggataagcgaagtgccactgggttctttgccctcccttcacaccatgggataaatctgtatcaagacggttcttttctagatttcctctacctttttgctcttaaaactgcttctctgctctgagaagcacagctacctgccttcactgaaatatacctcaggctgaaatttggggtgggatgcaggtcagttgatcttctgaggaaggtcagcttttcatatcagctcacacgccgcagtcattcttaagactgccgctaggctgatgtgcatttactttgagctttnggggtatctacacaacagtcatggaagaacagtctggatacagcagatgtcactgtaccttttacatgcgtaggtcgaccggggtccgaggcttacaaaatctcgtttaacgggagtcgcgcccaaagtggggggcgggtgggaaaatagtatttactctggtccgagaggtctgagccccgaggagctctttcgccccggaaaaaaaagcgcggtggtgcggtagacacctctggccctgggggcgctccat

SEQ ID NO: 85 - DNA, 3103 bp, Homo sapiens
  misc feature (293): n equals a,t,g, or c
ggaaattagcatggtgttatagaatcccaggattcttaaatgttaccttctctaactaatatatattgcttgactatctagacttatacttaacaggtatttacatctttgaacacagaacagctgatggagaaagaagcattataaataatatacataaactcagtttgtacagataatccgtaatttttaatgtttaacttgtctaaatgctatatgtaatatctttcatcagtttttttaaagtaattatcctttcatattggttttttcccaccaaataaaaccattanaggaccagagatcaagaagccccaraggatgtacaagtcaggccagaggatactccttcagatctcagtgttagtaattccagtgtcatactggaaaacacgatggaagaccatgctgctgaggcatccgggaagcctctaggtgaaattagtgttccactggacagctctttactttgtactttgtcctcagaatctcaccaggaagcagctagtaatgagaatgataaaaaacytggtaactacaaatctatgttacgaccagaggttggcaccacttcacaagattcagctctcttagatcaggaattgtataactccttccatttctggaggactcctcttcctgaaatagatctagacatagagcttgaacagaactctgggggaaaacccagcccagagggaccagaggaagaatctgagggccctgtgcccagttctccaaacatcaccatggccaccagaaaggaactggaagaaatgatagaaaatctagagccccacattgatgatccagatgttaaagcacaagtggaagtgctgtccgctgcactacgtgyttccagcctggatgcacatgaagagaccatcagtatagaaaagagaagtgatttgcaagatgaactggatataaatgagctaccaaattgtaaaataaatcaagaagattctgtgcctttaatcagcgatgctgttgagaatatggactccactcttcactatattcacarcgattcagacttgagcaacaatagcagttttagccctgatgaggaaaggagaactaaagtacaagatgttgtacctcaggcgttgttagatcagtatttatctatgactgacccttctcgtgcacagacggttgacactgaaattgctaagcactgtgcatatagcctccctggtgtggccttgacactcggaagacagaattggcactgcctgagagagacgtatgrgactytggcctcagacatgcagtggaaagttcgacgractctagcattctccatccacgagcttgcagttattcttggagatcaattgacagctgcagatctggttccaatttttaatggatttttaaaagacctcgatgaagtcaggataggtgttcttaaacacttgcatgattttctgaagcttcttcatattgacaaaagaagagaatatctttatcaacttcaggagtttttggtgacagataatagtagaaattggcggtttcgagctgaactggctgaacagctgattttacttctagagttatatagtcccagagatgtttatgactatttacgtcccattgctctgaatctgtgtgcagacaaagtttcttctgttcgttggatttcctacaagttggtcagcgagatggtgaagaagctgcacgcggcaacaccaccaacgttcggagtggacctcatcaatgagcttgtggagaactttggcagatgtcccaagtggtctggtcggcaagcctttgtctttgtctgccagactgtcattgaggatgactgccttcccatggaccagtttgctgtgcatctcatgccgcatctgctaaccttagcaaatgacagggttcctaacgtgcgagtgctgcttgcaaagacattaagacaaactctactagaaaaagactatttcttggcctctgccagctgccaccaggaggctgtggagcagaccatcatggctcttcagatggaccgtgacagcgatgtcaagtattttgcaagcatccaccctgccagtaccaaaatctccgaagatgccatgagcacagcgtcctcaacctactagaaggcttgaatctcggtgtctttcctgcttccatgagagccgaggttcagtgggcattcgccacgcatgtgacctgggatagctttcgggggaggagagaccttcctctcctgcggacttcattgcaggtgcaagttgcctacacccaataccagggatttcaagagtcaagagaaagtacagtaaacactattatcttatcttgactttaaggggaaataatttctcagaggattataattgtcaccgaagccttaaatccttctgtcttcctgactgaatgaaacttgaattggcagagcattttccttatggaagggatgagattcccagagacctgcattgctttctcctggttttatttaacaatcgacaaatgaaattcttacagcctgaaggcagacgtgtgcccagatgtgaaagagaccttcagtatcagccctaactcttctctcccaggaaggacttgctgggctctgtggccagctgtccagcccagccctgtgtgtgaatcgtttgtgacgtgtgcaaatgggaaaggaggggtttttacatctcctaaaggacctgatgccaacacaagtaggattgacttaaactcttaagcgcagcatattgctgtacacatttacagaatggttgctgagtgtctgtgtctgattttttcatgctggtcatgacctgaaggaaatttattagacgtataatgtatgtctggtgtttttaacttgatcatgatcagctctgaggtgcaacttcttcacatactgtacatacctgtgaccactcttgggagtgctgcagtctttaatcatgctgtttaaactgttgtggcacaagttctcttgtccaaataaaatttattaataagatctatagagagagatatatacacttttgattgttttctagatgtctaccaataaatgcaatttgtgacctgtaaaaaaaaaaaaaaaactcgaggggggcccggtacccaaatcgccgatatgatctaa

SEQ ID NO: 86 - DNA, 901 bp, Homo sapiens
gattttaggtgacactatagaaggtacgcctgcaggtaccgttccggaattcccgggtcgacccacgcgtccgagcttggaacttcgttatccgcgatgcgtttcctggcagctacattcctgctcctggcgctcagcaccgctgcccaggccgaaccggtgcagttcaaggactgcggttctgtggatggagttataaaggaagtgaatgtgagcccatgccccacccaaccctgccagctgagcaaaggacagtcttacagcgtcaatgtcaccttcaccagcaatattcagtctaaaagcagcaaggccgtggtgcatggcatcctgatgggcgtcccagttccctttcccattcctgagcctgatggttgtaagagtggaattaactgccctatccaaaaagacaagacctatagctacctgaataaactaccagtgaaaagcgaatatccctctataaaactggtggtggagtggcaacttcaggatgacaaaaaccaaagtctcttctgctgggaaatcccagtacagatcgtttctcatctctaagtgcctcattgagttcggtgcatctggccaatgagtctgctgagactcttgacagcacctccagctctgctgcttcaacaacagtgacttgctctccaatggtatccagtgattcgttgaagaggaggtgctctgtagcagaaactgagctccgggtggctggttctcagtggttgtctcatgtctctttttctgtcttaggtggtttcattaaatgcagcacttggttagcagatgtttaattttttttttaacaacattaacttgtggcctctttctacacctggaaatttactcttgaataaataaaaactcgtttgtcttgtcwrmaaaaaaaaaaaaaacycga

SEQ ID NO: 87 - DNA, 559 bp, Homo sapiens
agatcccgaagcagcgctggksaggtaagtgcgggcagagcactgcgccgtttgggaacgcaactttgaggagacagtgcggtggttctggaggctgggaagtccaagaccagttggctcgcatctgacttcagtgaagttccttatgacttcccctgaaattgcttccttatcatgggggcaaatgaaagtaaaaggctctaatacaacctataaggactgcaaagtatggccagggggyagtcggacttgggattggagagaaacaggaactgagcattctcctggtgtgcagcctgcagatgtgaaggaagttgttgagaagggtgtacagactcttgtgattggccgagggatgagtgaggccttgaaggtgccttcatcaactgtggagtacctcaagaaacatggcattgatgtgcgggtcctccagacagagcaggcagtgaaggagtataatgccttggttgccaaggggtcagggtgggaggtgtcttccattccacctgctgatggagccttaagagragaataaatcactaagtgccwaaaaaaaaaa

SEQ ID NO: 88 - DNA, 2287 bp, Homo sapiens
  misc feature (2204): n equals a,t,g, or c
  misc feature (2269): n equals a,t,g, or c
  misc feature (2275): n equals a,t,g, or c
ggcacgaggctttagatgcttctgggtcgcggtgtgctaagcgaggagtccgagtgtgtgagcttgagagccgcgcgctagagcgacccggcgagggatggcggccaccgggaccgcggccgccgcagccacgggcaggctcctgcttctgctgctggtggggctcacggcgcctgccttggcgctggccggctacatcgaggctcttgcagccaatgccggaacaggatttgctgttgctgagcctcaaatcgcaatgttttgtgggaagttaaatatgcatgtgaacattcagactgggaaatgggaacctgatccaacaggcaccaagagctgctttgaaacaaaagaagaagttcttcagtactgtcaggagatgtatccagagctacagatcacaaatgtgatggaggcaaaccagcgggttagtattgacaactggtgccggagggacaaaaagcaatgcaagagtcgctttgttacacctttcaagtgtctcgtgggtgaatttgtaagtgatgtcctgctagttccagaaaagtgccagtttttccacaaagagcggatggaggtgtgtgagaatcaccagcactggcacacggtagtcaaagaggcatgtctgactcagggaatgaccttatatagctacggcatgctgctcccatgtggggtagaccagttccatggcactgaatatgtgtgctgccctcagacaaagattattggatctgtgtcaaaagaagaggaagaggaagatgaagaggaagaggaagaggaagatgaagaggaagactatgatgtttataaaagtgaatttcctactgaagcagatctggaagacttcacagaagcagctgtggatgaggatgatgaggatgaggaagaaggggaggaagtggtggaggaccgagattactactatgacaccttcaaaggagatgactacaatgaggagaatcctactgaacccggcagcgacggcaccatgtcagacaaggaaattactcatgatgtcaaagttcctccaactcctctgccaaccaatgatgttgatgtgtatttcgagacctctgcagatgataatgagcatgctcgcttccagaaggctaaggagcagctggagattcggcaccgcaaccgaatggacagggtaaagaaggaatgggaagaggcagagcttcaagctaagaacctccccaaagcagagaggcagactctgattcagcacttccaagccatggttaaagctttagagaaggaagcagccagtgagaagcagcagctggtggagacccacctggcccgagtggaagctatgctgaatgaccgccgtcggatggctctggagaactacctggctgccttgcagtctgacccgccacggcctcatcgcattctccaggccttacggcgttatgtccgtgctgagaacaaagatcgcttacataccatccgtcattaccagcatgtgttggctgttgacccagaaaaggcggcccagatgaaatcccaggtgatgacacatctccacgtgattgaagaaaggaggaaccaaagcctctctctgctctacaaagtaccttatgtagcccaagaaattcaagaggaaattgatgagctccttcaggagcagcgtgcagatatggaccagttcactgcctcaatctcagagacccctgtggacgtccgggtgagctctgaggagagtgaggagatcccaccgttccaccccttccaccccttcccagccctacctgagaacgaaggatctggagtgggagagcaggatgggggactgatcggtgccgaagagaaagtgattaacagtaagaataaagtggatgaaaacatggtcattgacgagactctggatgttaaggaaatgattttcaatgccgagagagttggaggcctcgaggaagagcgggaatccgtgggcccactgcgggaggacttcagtctgagtagcagtgctctcattggcctgctggtcatcgcagtggccattgccacggtcatcgtcatcagcctggtgatgctgaggaagaggcagtatggcaccatcagccacgggatcgtggaggttgatccaatgctcaccccagaagagcgtcacctgaacaagatgcagaaccatggctatgagaaccccacctacaaatacctggagcagatgcagatttaggtggcagggagcgcggcanccctggcggagggatkcaggtggggcgggaagatcccacgatttccgatcggattgccaagcagnagccgntgccagggggtt

SEQ ID NO: 89 - DNA, 607 bp, Homo sapiens
  misc feature (535): n equals a,t,g, or c
  misc feature (541): n equals a,t,g, or c
  misc feature (542): n equals a,t,g, or c
  misc feature (547): n equals a,t,g, or c
  misc feature (592): n equals a,t,g, or c
gtgaatctcaattatctgttcacaagtaattccttaactaaaaaacagtagatattgaacgagaaggtcatgtttaaatccttccattaatttctacatttctgatcatttgcttttggggatttttttaaagcagagtataattcagtggaagtgtgtctttgtccccagaggtttctgcatgtgcaagcattttaatctagactgccagaacccccaggctttttagtgaagtttgcagaggaagacttatctgtattgacttatatgttgcacagaacaaatgaaagtctcagacagtccttttttacccaacaaaggcttatttttttccatcctttgcttgggstcaagcactcctgccctgcgtgcctccactttaaacatgatcagaactgtgcttcattgcaaataacaactgaccaacaatggggccckgcttcatagatttgggaatgtttggcttaagctgccaatggactgaaggcctttaattcccaccggccagtcacagyctgctttggtggtggcctgntgatgnnctggngctcattattccttgacatgcaccattccccttcaccttcaaccnttcacaaccggacag

SEQ ID NO: 90 - DNA, 2338 bp, Homo sapiens
  misc feature (121): n equals a,t,g, or c
  misc feature (125): n equals a,t,g, or c
  misc feature (2333): n equals a,t,g, or c
  misc feature (2334): n equals a,t,g, or c
aaaaaaaaccagcaactgaagtggaccccacacattttgtaaaagcgcttcctaaagaggatccgtgacttgggagagggccactttgggaaggttgagctctgcaggtatgaccccgaanggancaatacaggggagcaggtggctgttaaatctctgaagcctgagagtggaggtaaccacatagctgatctgaaaaaggaaatcgagatcttaaggaacctctatcatgagaacattgtgaagtacaaaggaatctgcacagaagacggaggaaatggtattaagctcatcatggaatttctgccttcgggaagccttaaggaatatcttccaaagaataagaacaaaataaacctcaaacagcagctaaaatatgccgttcagatttgtaaggggatggactatttgggttctcggcaatacgttcaccgggacttggcagcaagaaatgtccttgttgagagtgaacaccaagtgaaaattggagacttcggtttaaccaaagcaattgaaaccgataaggagtattacaccgtcaaggatgaccgggacagccctgtgttttggtatgctccagaatgtttaatgcaatctaaattttatattgcctctgacgtctggtcttttggagtcactctgcatgagctgctgacttactgtgattcagattctagtcccatggctttgttcctgaaaatgataggcccaacccatggccagatgacagtcacaagacttgtgaatacgttaaaagaaggaaaacgcctgccgtgcccacctaactgtccagatgaggtttatcaacttatgaggaaatgctgggaattccaaccatccaatcggacaagctttcagaaccttattgaaggatttgaagcacttttaaaataagaagcatgaataacatttaaattccacagattatcaagtccttctcctgcaacaaatgcccaagtcattttttaaaaatttctaatgaaagaagtttgtgttctgtccaaaaagtcactgaactcatacttcagtacatatacatgtataaggcacactgtagtgcttaatatgtgtaaggacttcctctttaaatttggtaccagtaacttagtgacacataatgacaaccaaaatatttgaaagcacttaagcactcctccttgtggaaagaatataccaccatttcatctggctagttcaccatcacaactgcattaccaaaaggggatttttgaaaacgaggagttgaccaaaataatatctgaagatgattgcttttccctgctgccagctgatctgaaatgttttgctggcacattaatcatagataaagaaagattgatggacttagccctcaaatttcagtatctatacagtactagaccatgcattcttaaaatattagataccaggtagtatatattgtttctgtacaaaaatgactgtattctctcaccagtaggacttaaactttgtttctccagtggcttagctcctgttcctttgggtgatcactagcacccatttttgagaaagctggttctacatggggggatagctgtggaatagataatttgctgcatgttaattctcaagaactaagcctgtgccagtgctttcctaagcagtatacctttaatcagaactcattcccagaacctggatgctattacacatgcttttaagaaacgtcaatgtatatccttttataactctaccactttggggcaagctattccagcactggttttgaatgctgtatgcaaccagtctgaataccacatacgctgcactgttcttagagggtttccatacttaccaccgatctacaagggttgatccctgtttttaccatcaatcatcaccctgtggtgcaacacttgaaagacccggctagaggcactatggacttcaggatccactagacagttttcagtttgcttggaggtagctgggtaatcaaaaatgtttagtcattgattcaatgtgaacgattacggtctttatgaccaagagtctgaaaatctttttgttatgctgtttagtattcgtttgatattgttacttttcacctgttgagcccaaattcaggattggttcagtggcagcaatgaagttgccatttaaatttgttcatagcctacatcaccaaggtctctgtgtcaaacctrtggccactctatatgcactttgtttactctttatacaaataaatatactaaagactttaaaaaaaaaaaaaaaaaaaaaaaaaaaaaaaaaaaaaaaaaaaaaaaaaaaaaaaaaaaaaaaaaaaaaaaaaaaaaaaaaaaaaaaaaaaaaaagggggggggccnnaaaa

SEQ ID NO: 91 - DNA, 1274 bp, Homo sapiens
  misc feature (1264): n equals a,t,g, or c
  misc feature (1268): n equals a,t,g, or c
aattccgrgcggagagggaggaaaacttcttcctggcctgggctccgtgccgctctgtttgccaaccgtccagtcccgcctaccagtgccgggcgctccccacccctcccccggctcccccggtgtccgccatggccaaagcctacgaccacctcttcaagttgctgctgatcggggactcgggggtgggcaagacttgtctgatcattcgctttgcagaggacaacttcaacaacacttacatctccaccatcggaattgatttcaagatccgcactgtggatatagaggggaagaagatcaaactacaagtctgggacacggctggccaagagcggttcaagacaataactactgcctactaccgtggagccatgggcattatcctagtatacgacatcacggatgagaaatctttcgagaatattcagaactggatgaaaagcatcaaggagaatgcctcggctggggtggagcgcctcttgctggggaacaaatgtgacatggaggccaagaggaaggtgcagaaggagcaggccgataagttggctcgagagcatggaatccgatttttcgaaactagtgctaaatccagtatgaatgtggatgaggcttttagttccctggcccgggacatcttgctcaagtcaggaggccggagatcaggaaacggcaacaagcctcccagtactgacctgaaaacttgtgacaagaagaacaccaacaagtgctccctgggctgaggaccctttcttgcctccccaccccggaagctgaacctgagggagacaacggcagagggagtgagcaggggagaaatagcagaggggcttggagggtcacataggtagatggtaaagagaatgaggagaaaaaggagaaaagggaaaagcagaaaggaaaaaaaggaagagagaggaagggagaagggagaggaatgaattgaggaagtgaaagaaggcaaggaggtaggaagagagggaggaggaaaggaaggagagatgcctcaggcttcagaccttacctgggttttcagggcaaacataaatgtaaatacactgatttattctgttactagatcaggttttagggtcctgcaaaaggctagctcggcactacactagggaatttgctcctgttctgtcacttgtcatggtctttcttggtattaaaggccaccatttgcacaaaaaaaaaaaaaaaaaaaaaaaaaaaaaaaaaaaaaaaaaaaaaaaaaaaaaaaaaaaaaaaaaaaaaaaaaaangggnggccgc

SEQ ID NO: 92 - DNA, 1411 bp, Homo sapiens
gtgacgccgtctagaatagtggatcccccggtctgcagaattcggcacgagccctttcaagatgccactttcagactttattctggctctgaaggacaatccctactttggggctggatttgggctggtgggtgtgggcacagccctggccctggccsggaaggtgtccaactgggcctggtggcattccggcgccattacatgatcacactggaagtccctgctcgagacaggagctatgcctggttgcttagctggctcacccgccacagtacccgtactcagcacctcagtgtcgagacttcgtaccttcagcatgagagtggccgcatttccactaagtttgaatttgtccccagccctggaaaccattttatctggtatcgggggaaatggattcgggtagaacgaagtcgagagatgcagatgatagacttgcagacggggactccttgggaatctgtcaccttcacggccctgggcactgaccgaaagttttcttcaacatcctggaggaagctcgagagctagccttgcagcaggaggaagggaagaccgtgatgtacacagctgtgggctctgaatggcgtccctttggctatccacgccgccggcagccactgaattctgtggttctacaacagggtctggctgaccgaattgtcagagacgtccaggaattcatcgataaccccaagtggtacactgacagaggcattccttacagacgtggctacctgctttatgggccccctggttgcggaaagagcagttttatcacagccctggctggggaactggagcacagcatctgcctgctgagcctcacggactccagcctctctgatgaccgactcaaccacctgctgagcgtggccccgcagcagagcctggtactcctggaggatgtggatgctgcttttctcagtcgagacttggctgtggagaacccagtaaagtaccaaggcctaggtcgcctcaccttcagtggactgctcaatgccttggatggtgtggcttccaccgaggcccgcatcgtgttcatgaccaccaaccacgttgacaggctggaccctgccctgatacgcccggggcgagtggacctgaaggagtacgtgggctactgctcacactggcagctgacccagatgttccagaggttctatccagggcaggcaccttccttagctgagaactttgcagaacatgtccttcgagctacaaaccagatcagtcctgcccaggtgcagggctacttcatgctgtataaaaatgaccctgtaggggcaattcacaatgctgagtctctgaggaggtgatcaggctgggctcagctcagctctcctcctctagctcaataaacatctgccacactaaaaaaaaaaaaaaaaaaaattcggggggggccccg

SEQ ID NO: 93 - DNA, 729 bp, Homo sapiens
  misc feature (54): n equals a,t,g, or c
  misc feature (69): n equals a,t,g, or c
aaaccactgtgtgaaaaatcaaattttaattttgaaatggaataatttcaaagnaactatgaaagatgnatttgaagctctgaatttatatagtcacctataaaatgttctttatatgtgttcataagtaaattttatattgattaagttaaacttttgaattgatttgaggagcagtaaaatgaaagctatatctattctaaaccttatttagacattggtaccagttacccaggtgaaaatatggagtaactttgttttgtatggtaaggtttaggaatggtggatgaagggtatctctatataaataaagtgctcaacaatgtgcaatgattgtaaatttagtaagatattacagccatttcatgaatgctttaccattcaacatagtatctattacaaaacacctttcttgtatccatatacttcaggtgttgctgttaacatttactatgatatttattttaaccaaaatgttactcacattaaatgtttattctttaaaatgaatgtattatgtttttaacccacaaatgcatacttaccctgtgcctcatatttcaatagtactgtaatatggacatcttttgtgaaatacttttattttgttatgctttaaatatacatacaaaaagatttctgttattagctttgaaaattgtataatatcctaatataaacaaaaatataaaaataaaaatgaatacagtaaaaaaaaaaaaaaaaaaa

SEQ ID NO: 94 - DNA, 1795 bp, Homo sapiens
  misc feature (213): n equals a,t,g, or c
ggtcgaccacgcgtcggccaaaatggaccaaacaacccggccagagaatgcggcttctgagtgtaagacactgaggcggtgtcacagacaggtaaagtgaatgccgaagacagaagatttggatgatacaccactgactttctttgtttggaatacacgttatgaaccctttctggagcatgtctacaagctctgtacgcaaacgatctgaangtgaagagaagacattaacaggggacgtgaaaaccagtcctccacgaactgcaccaaagaaacagctgccttctattcccaaaaatgctttgcccataactaagcctacatctcctgccccagcagcacagtcaacaaatggcacgcatgcgtcctatggcccttctacctggaatactctcttcttgcagaatttaccttggttgtgaagcagaagctaccaggcgtctatgtgcagccatcttatcgctctgcattaatgtggtttggagtaatattcatacggcatggactttaccaagatggcgtatttaagtttacagtttacatccctgataactatccagatggtgactgtccacgcttggtgttcgatattcctgtctttcacccgctagttgatcccacctcaggtgagctggatgtgaagagagcatttgcaaaatggaggcggaaccataatcatatttggcaggtattaatgtatgcaaggagagttttctacaagattgatacagcaagccccctgaacccagaggctgcagtactgtatgaaaaagatattcagctttttaaaagtaaagttgttgacagtgttaaggtgtgcactgctcgtttgtttgaccaacctaaaatagaagacccctatgcaattagcttttctccatggaatccttctgtacatgatgaagccagagaaaagatgctgactcagaaaaagaagcctgaagaacagcacaataaaagtgttcatgttgctggcctgtcatgggtaaagcctggctcagtacagcctttcagtaaagaagagaaaacagtggcgacttaagagatggtgaatctggtgcaccatgcactttcctgctagactctggcctagttcaagctgaccaatggcagaggactgcctgaagagtaaaactgtgtgaacaatgactgactgccagtgttttccatgtatgcataggttctaacagcagggtttggaaacctgtctctaagtaatgcattacttctgtcagaagtgtcttagggtggttatctagttcagtactccaaattattggggaccttgaggcttaagtaagtatttttctgaatataatgctaaaggtaagttgcattcatttaaactaatagagcagacagaattcagcactacttaatagtttataaatcagtggtttcagttgtatatatgttaggaaatggagaggtatagagagagcaggttccatagctcagcacttttaagtggaagatcatttgaatctcagtcttcagcctgcactgatttgtagcctgcactgtcttactgatttacaaactgaaatcactgagaaatgtctttagttcagtgagaagaaaccagaacacttgttcctagtgttgtgttgttttttttaagcaaattacttactgtatttttatggcaggagggagaaaaagtgttacaacggtttctaatgaagtccggtatttaaatgataaatgactaatgtgtttagtagagacaaaataaaccaataaatgataaaaaaaaaaaaaaaaaaaagggcggccgctcgcgatctagaactag

SEQ ID NO: 95 - DNA, 757 bp, Homo sapiens
  misc feature (719): n equals a,t,g, or c
  misc feature (743): n equals a,t,g, or c
  misc feature (749): n equals a,t,g, or c
cccacgcgtccgggaaaaataaagtaagcaaacgattcaacaagtgaatatttaatgtaaataaggaatattctaaataaggaaatcattcttagatttgaataggatcaagttttaggttctgagcacacatctaggatttttgtattctttctcaaatacagtacatattcmttttttccyaacttagagattgcmaacctgtgatctttgaatcagatctgtgccacaaatttttgtttggccactgtagtgatctttaagaatattttatatatgaaatctggatttagggktcccatggtctggcaccactgggtacagtagttctacatggcagtaattcatggagttgaagcagtgaggaaagagtcmagtacyagtcytttatccycagtgtccagtgactgtcmagagaaatgggactgccttcygcatgggatatgtgggttaaagagtagtccawtatagargagtgagaaagtgaaccctctgaggcatagtaakgttttatttgaaaacatctcacatgtattgaatacttagataggatgtattctgtattactgaattttccagattattgaagcaatcacctttctgtgtttaaagttttagaaagaaagcttttaaaaatgcttaacataagataagcctgttttcatggtgcaaggtcctttctatgaacatgaatcactggactctgaaggttggactanatccatctaccttcccttttaaangctaangggctcaa

SEQ ID NO: 96 - DNA, 888 bp, Homo sapiens
  misc feature (329): n equals a,t,g, or c
  misc feature (332): n equals a,t,g, or c
  misc feature (647): n equals a,t,g, or c
  misc feature (688): n equals a,t,g, or c
  misc feature (780): n equals a,t,g, or c
  misc feature (805): n equals a,t,g, or c
  misc feature (809): n equals a,t,g, or c
gcagatactataatatttccttttattttagtgttatttagctttattacagatttctatttttgtcaaaacttcatggttcctttcaagatcttttttgccaaaacattttgatactatagcattgtacatttgaaagtagtgttctagactataaaaccaatgaacttctacatgagccctacagacaggcatgtgtagaaggcaatttatcaaacctattgcactgccatgaaaagtgtgtataataatttgctagcccaagcaagctagttttctttgcttgcttcttttctttcttttttccttcctttttttttttttttttnttnttttttaacatgttgagattctctagttgttttctttggcgtatctaaccccttcttttgttttctgagacctggtaacccacgctcttgcattgtggattttaaaatgtatactctgtacggttctgtaaaccgaaaaacttttgtaaatatataaatatacatagacataaaaatactgtatgtgacagcacatagagtagttttcccacaccaaagttaatttttatgcatgctttaaaagtatatatcgggamcggcagaaatggaagtatccatacatttttaaaaagcaacaagtttgcacagctagantgtttttgtaaataaatgtatttgtataacacagtcatgtnatatacagaactataagcagaaactttgcaaaactaaattaaaggctgcatgcttattattttttgtaccttgtcctataactacttcctantccaagaacgaaatgttactgttancgantttaatgtttttccgctttgaaggatttaccacatccactcccaagacctacttttcttaaaacccctggggttactaa

SEQ ID NO: 97 - DNA, 2551 bp, Homo sapiens
  misc feature (2546): n equals a,t,g, or c
  misc feature (2550): n equals a,t,g, or c
cgggctgcaggaattcggcacgagcttccttcctcagttcccttaaagcacagcccagggaaacctcctcacagttttcatccagccacgggccagcatgtctgggggcaaatacgtagactcggagggacatctctacaccgttcccatccgggaacagggcaacatctacaagcccaacaacaaggccatggcagacgagctgagcgagaagcaagtgtacgacgcgcacaccaaggagatcgacctggtcaaccgcgaccctaaacacctcaacgatgacgtggtcaagattgactttgaagatgtgattgcagaaccagaagggacacacagttttgacggcatttggaaggccagcttcaccaccttcactgtgacgaaatactggttttaccgcttgctgtctgccctctttggcatcccgatggcactcatctggggcatttacttcgccattctctctttcctgcacatctgggcagttgtaccatgcattaagagcttcctgattgagattcagtgcatcagccgtgtctattccatctacgtccacaccgtctgtgacccactctttgaagctgttgggaaaatattcagcaatgtccgcatcaacttgcagaaagaaatataaatgacatttcaaggatagaagtatacctgattttttttccttttaattttcctggtgccaatttcaagttccaagttgctaatacagcaacaatttatgaattgaattatcttggttgaaaataaaaagatcactttctcagttttcataagtattatgtctcttctgagctatttcatctatttttggcagtctgaatttttaaaacccatttaaatttttttccttacctttttatttgcatgtggatcaaccatcgctttattggctgagatatgaacatattgttgaaaggtaatttgagagaaatatgaagaactgaggaggaaaaaaaaaaaaaagaaaagaaccaacaacctcaactgcctactccaaaatgttggtcattttatgttaagggaagaattccagggtatggccatggagtgtacaagtatgtgggcagattttcagcaaactcttttcccactgtttaaggagttagtggattactgccattcacttcataatccagtaggatccagtgatccttacaagttagaaaacataatcttctgccttctcatgatccaactaatgccttactcttcttgaaattttaacctatgatattttctgtgcctgaatatttgttatgtagataacaagacctcagtgccttcctgtttttcacattttccttttcaaatagggtctaactcagcaactcgctttaggtcagcagcctccctgaagaccaaaattagaatatccatgacctagttttccatgcgtgtttctgactctgagctacagagtctggtgaagctcacttctgggcttcatctggcaacatctttatccgtagtgggtatggttgacactagcccaatgaaatgaattaaagtggaccaatagggctgagctctctgtgggctggcagtcctggaagccagctttccctgcctctcatcaactgaatgaggtcagcatgtctattcagcttcgtttattttcaagaataatcacgctttcctgaatccaaactaatccatcaccggggtggtttagtggctcaacattgtgttcccatttcagctgatcagtgggcctccaaggaggggctgtaaaatggaggccattgtgtgagcctatcagagttgctgcaaacctgacccctgctcagtaaagcacttgcaaccgtctgttatgctgtgacacatggcccctccccctgccaggagctttggacctaatccaagcatccctttgcccagaaagaagatgggggaggaggcagtaataaaaagattgaagtattttgctggaataagttcaaattcttctgaactcaaactgaggaatttcacctgtaaacctgagtcgtacagaaagctgcctggtatatccaaaagctttttattcctcctgctcatattgtgattctgcctttggggacttttcttaaaccttcagttatgatttttttttcatacacttattggaactctgcttgatttttgcctcttccagtcttcctgacactttaattaccaacctgttacctactttgactttttgcatttaaaacagacactggcatggatatagttttacttttaaactgtgtacataactgaaaatgtgctatactgcatactttttaaatgtaaagatatttttatctttatatgaagaaaatcacttaggaaatggctttgtgattcaatctgtaaactgtgtattccaagacatgtctgttctacatagatgcttagtccctcatgcaaatcaattactggtccaaaagattgctgaaattttatatgcttactgatatattttacaattttttatcatgcatgtcctgtaaaggttacaagcctgcacaataaaaatgtttaacggttaaaaaaaaaaaaaaaaaaaaaanaaana

SEQ ID NO: 98 - DNA, 1106 bp, Homo sapiens
  misc feature (43): n equals a,t,g, or c
  misc feature (1081): n equals a,t,g, or c
  misc feature (1099): n equals a,t,g, or c
tttcttgtgctttctatgactgcatcagaacagagaatgtcantatccaataggatgccagtggaattccctgacgattccatccacgcggctctgctggagcagggtagtgtcctaggctgggaggaatgggatggagcctccacctcatggaagtagcttcctttggaggtggctatggcaggtcttcggagagaatatgcttttaaggctattaaccagggtggccttacatcagtagctgtcagagggaaagactgtgcagtaattgtcacacagaagaaagtacctgacaaattattggattccagcacagtgactcacttattcaagataactgaaaacattggttgtgtgatgaccggaatgacagctgacagcagatcccaggtacagagggcacgctatgaggcagctaactggaaatacaagtatggctatgagattcctgtggacatgctgtgtaaaagaattgccgatatttctcaggtctacacacagaatgctgaaatgaggcctcttggttgttgtatgattttaattggtatagatgaagagcaaggccctcaggtatataagtgtgatcctgcaggttactactgtgggtttaaagccactgcagcgggagttaaacaaactgagtcaaccagcttccttgaaaaaaaagtgaagaagaaatttgattggacatttgaacagacagtggaaactgcaattacatgcctgtctactgttctatcaattgatttcaaaccttcagaaatagaagttggagtagtgacagttgaaaatcctaaattcaggattcttacagaagcagagattgatgctcaccttgttgctctagcagagagagactaaacattgtcgttagtttaccagatccgtgatgccacttacctgtgtgtttggtaacaacaaaccaacatcatggaggtccctggattgaaaaaggagcctctcccactcctcctaccaccgaagtggttaggactctatataaataaaaacaaggcttttggaaaawaaaaaaaaaaaaaaaaaaaaaaaaaaaaaaaaaaaaaaaaaaaaaaaaaaaaanaaaaaaaaaaaaaaaaanaaaaaaa

SEQ ID NO: 99 - DNA, 1268 bp, Homo sapiens
  misc feature (112): n equals a,t,g, or c
  misc feature (932): n equals a,t,g, or c
  misc feature (1203): n equals a,t,g, or c
  misc feature (1207): n equals a,t,g, or c
ggcacgagtaggcctctcctgctgctgaatgacaagcctgcgrggaagggcttgattacgatcgctgcccaggagctgtccgacaaccgcgtcatcacactaagcctggcgngcaggaggctggacaagaaggacctctttgggaagtcagacccctttctggagttttataagccaggagacgatggcaagtggatgctggtccacaggactgaggtgatcaagtacacactggaccctgtgtggaagccattcacagtgcccttggtgtccctgtgtgatggggacatggagaagcccatccaggtcatgtgctacggactatgacaatgacgggggccatgacttcatcggcgagttccagacctcagtgtcacagatgtgtgaggctcgagacagcgtcccgctggagttcgagtgcatcaaccccaagaagcagaggaagaagaagaactataaaaactcgggcatcatcatcctgcgatcctgcaagataaaccgagactactccttccttgactacatcctgggaggctgccagctcatgttcaccgttggaatagactttacagcctccaacgggaatcccctcgacccttcctctttgcactatatcaaccctatgggcaccaacgaaatatctgtcggccatctgggctgttgggcagatcattcaggactacgacagtgataagatgtttccagctctgggattcggggcccagttacccccagactggaaggtctcccatgagtttgccatcaacttcaaccccaccaaccccttctgctcaggtgtggatggtattgcccaggcgtactcagcttgcctgccccacatccgcttctacggtcctaccaatttctcccccatcgtcaaccacgtggcccggtttgcggcccaggccacacaacagcggacggccacgcantacttcatcctcctcatcatcacggacggggtcatcagtgacatggaggagacacggcatgccggttgcaggcttccaagctgcccatgtccatcatcatcgtgggcgtgggcaatgcggacttcgctgccatggagttcctggatggggacagccgcatgctgcgcttcccacacgggggaaggaggcagcccgcgatattgtggcattcgttcccttttcgagatttccgcaaagcagcaaaagagaacttggccaaagctgtgctggncggnatggccccaacaattgttgcattatttcaagcataaaaaactggccccccaacaaattcgg

SEQ ID NO: 100 - DNA, 1143 bp, Homo sapiens
  misc feature (1143): n equals a,t,g, or c
tttgtatcaaaacttgaaattcctctatttctattgggatataaaagccttccccttcagtgaagaaaacatttattttttatttgattcctaggatttagtaaactctagctgtctatttaaaatgtactgaggcacaacaagtattatactggaagacttgccaaactggcaaagctttaagttcatcagcattctatgtggttcagagctgtgatttttgcaaagtattttaccaacctcctcgatggctttgataaaggttagatttgatgtttttttttagatttatttttcttactccactaaactataaagaaaataattacttagaaactccattttaaataatcatttcctagaaattcttaaatatatacagaattttaaagaaaacatttcatctgatttagttagcatccacatatcattgaggaattaaagtgtgggacagtcattattaaaaaaaagagagaaaagccctctattagacattccacaatccatgttttaagcttatccaaaggtccaaatgtcagccattctgtatgttcatgttgatcatttgcgaacaagaaagcaggtttctaggtatcacttaggatgtgaactgcctctcaactttaaaccctgttagctttacttttttaagtccacaagtgatgaaactagtttctcagctaggcttgtactttcctcattatttctagtatttcaaatattctcaaacaaaagagttaccacttttctccatttattttcagttatggaaatgttccctctcttcaccactaagctccaaagcaaatgaaagacgatcacatgtcaggacagtagtaaaggcagcttataaatgggacataaatcagagatgtgttggtattttgagactcaagactgtccttttttaaaataaaaataaaaacattaccaggttcccaagccaatctggcttaaccaacagtgcactgaaatattagtgtttacctccaaggctagggagccaaggggaggaggagaattggaggaaggggagataatgggaagaggatggcgccttcctgagttggctagagggccaacctttgataacagtttgacgaaatcaatcttttttttttttttttgggaagggcccctttn

SEQ ID NO: 101 - DNA, 585 bp, Homo sapiens
  misc feature (455): n equals a,t,g, or c
  misc feature (508): n equals a,t,g, or c
  misc feature (522): n equals a,t,g, or c
  misc feature (540): n equals a,t,g, or c
  misc feature (551): n equals a,t,g, or c
  misc feature (585): n equals a,t,g, or c
ggaacattgaaataaaggaagtgttccttagttcccgtgtgaaagcagaggaacccatgacatccaagggcgtgaaaggatcagagctgactggacatagtgagctgccttcttgcgttcgggtgcacccctgttaaacctgatctgtgtcataagtgactccggatgcatcagtgtccaccagttggaagcaatgacaaggatggctggctggtgtttttcagccttccggtttatagactgtatttatctagtggattcctgcaggccccatactgagcctggactgaaagtatccactcggaccatctgttatctctctacactgaaaataaaacctcttccacccaccccattcggttcttctgcctgaccttcaaatgcccatgttggccttttacagcagtgccacggcaccaagcgagctgccacatctcacactctaaagggtttgnaactattagttcttgtcattttttaaaaaaaaccattcccaagttgaaattgnttatatccgtctgntcttgcgtgtgtcaraanctgggtttttngtggaaggttcccaaaacaaaggcaacaccattn

SEQ ID NO: 102 - DNA, 579 bp, Homo sapiens
  misc feature (553): n equals a,t,g, or c
gacggctgcgagaagacgacagaaggggagtccccacctctctcagcttccggctggtagtagttccgcttcctgtccgactgtggtgtctttgctgagggtcacattgagctgcaggttgaatccggggtgcctttaggattcagcaccatggcggaagacatggagaccaaaatcaagaactacaagaccgccccttttgacagccgcttccccaaccagaaccagactagaaactgctggcagaactacctggacttccaccgctgtcagaaggcaatgaccgctaaaggaggcgatatctctgtgtgcgaatggtaccagcgtgtgtaccagtccctctgccccacatcctgggtcacagactgggatgagcaacgggctgaaggcacgtttcccgggaagatctgaactggctgcatctccctttcctctgtcctccatccttctcccaggatggtgaagggggacctggtacccagtgatccccaccccaggatcctaaatcatgacttacctgctaataaaaactcattggaaaaaaaaaaaaaanaaaaaaaatcgggggggggcccgtaa

SEQ ID NO: 103 - DNA, 405 bp, Homo sapiens
tccatccgggtgccccattccggstccctgggwgatcagtgttgtragtgcatgtraaatgggggatccccacccccagtgcccttccccttcctggggcccactcacactacaccctcttcctttcccaccccacctccccggagagaaactggacatggggcctggggaggggagctggccagaggaggacccctttcccgtggcattagaagggggaggggtggctggggcccccacccattccccctccctccaaactcccaacccccagtcagtgtttgagcctcctcgttcccctcacgcacccgctcacgcaccctcggtgaatccttggtgatgattttggcaactttgggaataaatggcaattcccacggamwaaaaaaaaaaaaaaaaaaaaag

SEQ ID NO: 104 - DNA, 2158 bp, Homo sapiens
gaggcctgtcggagtcagctccttccagactggtgggcgcacagcccagcacaggcgtgccgctggtracggggtacaccacctacracgcgcaccattcagcattctcccagatggtgawcagcttctactatgggggcaagctggtgggccaggccaccaccacctgccccgagggctgccgcctgtccctgagccagcctgggctgcccggcaccaagctgtatgggcccgagggcctggagctggtgcgcttcccgccggccgacgccatccccagcgagcgacagaggcaggtgacgcggaactgttcgggcacctggagcgcggggtgctgctgcacagcagccggcarggcgtgttcgtcaagcggctgtkccagggccgcgtgttctkcagcggcaacggttggtgtgcaaaggcaggcccaacaagctggagctgatgaggtggtccaggtcttcgacaccagccagttcttccgagagctgcagcagttctataacagccarggccggcttcctgacggcarggtggtgctgtgctttggggaagagttccggatatggcccccttgcgctccaaactcattctcgtgcagattgagcagctgtatgtccggcaactggcagaagaggctrggaagagctgtggagccggctctgtgatgcaggcccccgaggagccgccgccagaccaggtcttccggatgtttccagatatttgtgcctcacaccagagatcatttttcagagaaaaccaacagatcaccgtctaagtgcgtcgcttgggcgccccaccccgtctgcgtcctgcatccatctccctgttacagtggcccgcatcatgattaaagaatgtggatccctctgtctggggtgggatgccttactttgcacttaatttaataagggcattctcggaggagtagacgtttaatacgaatgggcggcatagccctgccgagatgtcggtgatggcctggatgctgtaaccacaacctgtggctaaaaattttattttctatcctttacccgtcattatcattagttgctatgattctttctgcattttcggttaactatcatttccaaagacttgtcattcagtaatattagcagatagctgcttcgataaaggaatttggagtttaaaaatcaacttgtgaaaacaaggttgtttttgtctttatcktttgttagagttatagatttatgatttcataggcttgattctatgtgaaatatctttttacttttatgcattttaataagatttaaaaatatttagattaaagccccctttaatgagtacaagaaaaactcttggcttgttagaagaaagtatattctttctagaatttggtgcaggaatatgtgttcatatccaggcaaacgggtgtgtttttatcttcagacaatgaaaccttctcctctggggctttgttgccaggaagattagaactaaatttatttttttcatttctgtcatgaaatcattccagatacctcttttcttctttccaaatggttttcacatgtgtttgaaatatttgtacttygaattgtcggattttccatgtcctcctttctcctttgtgcccagcctgagtcagcaccatcccgcattcagaacctcccagtgaaagggcagccttcattttgagaaggtggaaggtgttagggtttgggagacagctcatccaatctcccaagtctcatggtggatttgtgactgtgagagtttccggtttaaaatctgaaaagccagatatgcctgtttccttttcccagcaccatgcctgtggaggggacagtcagacccagaggtcctttacgtgtggatggagttcacaggcgaatagaggagaggaccaggggacgtggcttgtcccttttgtccaacaaagcattatatttttaagaatggcagacctgtttgctgaagtgttcataagataacaataggcttgaatctccaattcaaatgaatgtcaaagcacatatctttaatatgctgaatgaatatttatttttgtatccattaaaacagtatattgatctcttttattctttattaaaataaaatgctcttttttaaaaaaaaaaaaaaaaaaaaaaaaaaaaaagggcggccgctctagaggatccctcgaggg

SEQ ID NO: 105 - DNA, 867 bp, Homo sapiens
ggcagagctgtgctgcacagggggaggagagggaaccccaggcgcgagcgggaagaggggacctgcagccacaacttctctggtcctctgcatcccttctgtccctccacccgtccccttccccaccctctggcccccaccttcttggaggcgacaacccccgggaggcattagaagggatttttcccgcagttgcgaagggaagcaaacttggtggcaacttgcctcccggtgcgggcgtctctcccccaccgtctcaacatgcttaggggtccggggcccgggctgctgctgctggccgtccwgtgcctggggacagcggtgccctccacgggagcctcgaagagcaagaggcaggctcagcaaatggttcagccccagtccccggtggctgtcagtcaaagcaagcccggttgttatgacaatggaaaacactatcagataaatcaacagtgggagcggacctacctaggcaatgcgttggtttgtacttgttatggaggaagccgaggttttaactgcgagagtaaacctgaagctgaagagacttgctttgacaagtacactgggaacacttaccgagtgggtgacacttatgagcgtcctaaagactccatgatctgggactgtacctgcatyggggctgggcgagggagaataagctgtaccatcgcaaaccgctgccatgaagggggtcagtcctacaagattggtgacacctggaggagaccacatgagactggtggttacatgttagagtgtgtgtgtcttggtaatggaaaaggagratggacctgcaagcccatagytgagaagtgtttgatcatgctgctgggactcctatgtggtcrgagaacgtgggagaag

SEQ ID NO: 106 - DNA, 442 bp, Homo sapiens
  misc feature (435): n equals a,t,g, or c
agaagcaggaactccaggatcccaaaccagagcagaccctatagtaaagtatttttacatcttttcctttccccagaagagatccctaacctattgttttattgacagccttgctgttagaggctctttcccagaagttggacgaagaggctcaggcgttgctgtttcttgtcttccaagtcaagtggttactctggtaatggattgcctctctccgagctttcaccctggtgagactgtccagatctagtctgtaaacccagcttagaagcactgttgtaaaaatgactgaagagcccatcaaggagatcctgggagccccaaaggctcacatggcagcgacgatggagaagagccccaagagtgaagttgtgatcaccacagtycctctggtcagtgagattcagttgatggctgctacagggggtaccgagntctcctg

SEQ ID NO: 107 - DNA, 1468 bp, Homo sapiens
  misc feature (591): n equals a,t,g, or c
  misc feature (811): n equals a,t,g, or c
  misc feature (1464): n equals a,t,g, or c
  misc feature (1467): n equals a,t,g, or c
ggagcatctgtgggattttggtatccacgggggttcctgggaaccaatcccctgtggataccaaggggacggtatacactcacctccaaaaccctccttgcaccccaatctgccctagacaccacctcctgatggcctcatccctggtcaagggcgggagttgggagatggctasatsgggarcggtatttctgaatttctgtttccagtgttctctgargcttaatgggaacatttctcttaggaggatccaaacccactcttgggggacatgaggccgcgctgcatgacttgctgaacggcacagggacccctcgaggaacaaggttgcacaccagctttcagccaccatgactgtggggagtggctggaccaarggctgacctccccgactgcatcaaagttggggaaccaagtctcagagtgaggcgggggcctttcggatatcacatgggacagaggaagagcccggctggaatctgacttacctggaccgctgtccttgtgaggcattgaatgcccagtgcagtatccgagagactgtttaataacctgtcttcccagccaattggtggtgctggaatcccctangagccttcagtctgggagaaacagagccagacatagacagttccagcatcacagaaccagaagaagagacctgcaactgtgagartccagacaggaagcagagaaggcgtccttgyggaaagggcattttagctgaggctttggagtacgaataggagctcagcaggcagacgaatgaggaataaaggtcagagaaggtcagagctgagtgacgtttggnaatccaccccgtttattgtagaactgggggttcagagggcaggtgcctcaragttgaggccacacagtgaggtctggtgggtgaaaggacccaggaacgaggcgttcaggaaagcaggttgtcagagctatgtggagtctgtgggtggcaggggcagccgctccagcctttgaagactttgaaagccagagattcctggcgcaggcttggacttcctgggagctcctccaagtacccaggggcatcagagctgcctgggtgttacatggcccagggaacccaggttcagggtaggacaggcaagaccagatacccaatgtgcaaagtgaaaacactgggctccctgttaaacgatgaagaattcaagacagtgacagcattacgtcacccctggggacagaggtcagcctaaggtgacacacggggactactgtgcttccggaggctccctgtgtcctggaggagaaaagcattagagggggcagctggacaagctcccaactgcagagtcccagccctggctggggcagggccccggcctgggactcagcatttctgatatgccttaagaattcattctgttttgtacaattattttttaaaagtaaacgtgtggagaaagaaaaaaaaaaaaaaaaaaaaaaaaggggggnccnc

SEQ ID NO: 108 - DNA, 2488 bp, Homo sapiens
  misc feature (1134): n equals a,t,g, or c
cgcgtcctgcctgcagagagccaggccggagaagccgagcggcgcagaggacgccagggcgcgcgccgcagccacccaccctccggaccgcggcactgctgacccgccatcgccatggcccgcgggaaagccaaggaggagggcagctggaagaaattcatctggaactcagagaagaaggagtttctgggcaggaccggtggcagttggtttaagatccttctattctacgtaatattttatggctgcctggctggcatcttcatcggaaccatccaagtgatgctgctcaccatcagtgaatttaagcccacatatcaggaccgagtggccccgccaggattaacacagattcctcagatccagaagactgaaatttcctttcgtcctaatgatcccaagagctatgaggcatatgtactgaacatagttaggttcctggaaaagtacaaagattcagcccagagggatgacatgatttttgaagattgtggcgatgtgcccagtgaaccgaaagaacgaggagactttaatcatgaacgaggagagcgaaaggtctgcagattcaagcttgaatggctgggaaattgctctggattaaatgatgaaacttatggctacaaagagggcaaaccgtgcattattataaagctcaaccgagttctaggcttcaaacctaagcctcccaagaatgagtccttggagacttacccagtgatgaagtataacccaaatgtccttcccgttcagtgcactggcaagcgagatgaagataaggataaagttggaaatgtggagtattttggactgggcaactcccctggttttcctctgcagtattatccgtactatggcaaactcctgcagcccaaatacctgcagcccctgctggccgtacagttcaccaatcttaccatggacactgaaattcgcatagagtgtaaggcgtacggtgagaacattgggtacagtgagaaagaccgttttcagggacgttttgrtgtctgtggtagcttttaggctgctcctaacccaccatttattgccttctragaggtgggtgaggacaagcatgtgcctgtttgtgtgtgtgtgtgtgtgtatatgtgtgtgtgtgcacgcacatgcgtgtgntataagcccacctgagtggggctcgtgcaggagaactgaggcatgaaactctggctcaaacctaggaattgagagcgtttctgtcttttgggagagtacttttctccacgagccctctggccactgtgggagggaaggacaagggttcccttggaaatgtgaagggtcttggcctcatccctcaggtccccccacagcacttcccactactgcttctgtccctgctggcagcctctgtccctccagaacggctaaccagagcacactgtccccaccgcctcccctttctctctggaaagttgaagtatctccaaaggccttggaaatggcacaaaggtgataaggagcaggtgctttgctgcagtctcccttgcaaatgtataattaaggcctttcttcccaccccaagtccaagaacaaatgccagccacgtcctccgccacttggagagatgagaacccagtggggtcacgtaaaggaattgcaggtcggtgagaggacaagagggactcccatgttctaagcacctgttcctggccaggctctaggccaggctctctaagcacatttctcctttcattccccctaaaaacagagtgacctggaagtagatgttctttgctccttgtcagagttgaagaggctgacttggcccactgctaagcggcagaggcagggccagccatcctgtcgcaagcccgtgctggggctgccctttctgtttccagtccagttacggacttcccggccgccactgggccctgccggtcaccaggccactgtgcagtgggcgcagagcatggtcaggagtggcctgcccgtactcctccacccagatgagggccctccagagcctgcaggcatctgtggggaatcccagcctgcaggttcttggagaagcaggtgaacctaaggatgaaagcaaaggagggccttgaggaagcagcccccaggcctggcagccacgcagcggctgagctcatgaacttggttcgcagcctgccttgcccctggaggccacgccaggcgctcacccctgagcccacagcccctgcttgggctgcctggcaccctcagggtggcccggcctcctcctgccactctgagcacatgtccgggggttgccaccagagacggctttgttctcccagctaaggccgtggagctgctgtgtgactgtgtcaggcctggacaaggaagacccttagggatgacgtccccgctgcatatttattcaaggtgactcttgtacttggcaagggaagtccactgtgtgattgtctgtattcttaatataatttgttaaataaacgtttgttttaacctcttaaaaaaaaaaaaaaaaaactcgagg

SEQ ID NO: 109 - DNA, 1891 bp, Homo sapiens
  misc feature (1869): n equals a,t,g, or c
  misc feature (1891): n equals a,t,g, or c
tcctggggctgcacgtgtggtgaggcctacagaagcggccttcagctggaccttggtctccccgccggacttcgagggtgtcatcgccgcccctgttgggggtgagcgccgcgcggctgcagcatgcctcacaggaagaaaaagccctttatagagaagaagaaagctgtgtcttttcacttggtccaccggagccaacgagatcctttagcagcagatgagagtgcaccccagagggttctattgcccacacaaaaaatagacaatgaagaaaggcgagcagaacagaggaagtatggagtgttctttgatgacgactatgactacctgcagcacctgaaggaaccatctgggccttcagagcttattccctcaagtaccttcagtgcacacaacaggagagaggagaaagaagaaacgctataattccaagcactggaattaagttgccttcatcagtgtttgcttcagagtttgaggaagatgttggattgttaaataaagcagctccagtttcaggacctcgactggattttgatcctgacattgttgcagctcttgatgatgattttgactttgatgatccagataatctgcttgaggatgactttattcttcaggccaataaggcaacaggagaggaagagggaatggatatacagaaatctgagaatgaagatgacagcgagtgggaagatgtggatgatgagaagggagatagcaatgatgactatgactctgcaggcctattgtcagatgaagactgtatgtctgtgcccggaaaaactcacagagctatagcagatcacttgttctggagtgaggaaacaaagagtcgcttcacggagtattcgatgacttcctcagtcatgaggagaaatgaacagctgaccctacatgatgagaggtttgagaagttttatgagcaatatgatgatgatgaaattggagctctggataatgcagaattggaaggttctattcaagtggacagcaatcgcttacaggaagttttgaatgactactataaagagaaggcagagaattgtgtaaaattgaatacccttgaacccttggaggatcaagacctgccaatgaatgagcttgatgagtctgaggaggaagaaatgattactgtagtccttgaagaagccaaagagaagtgggattgtgaatctatttgtagtacatactcaaatttatataaccatccacagcttatcaagtatcaaccaaagcccaaacaaattcgaatatcttctaaaacaggaatacctctcaatgtcttaccaaagaaaggactcacagcaaagcaaactgaagaaatacagatgattaatggcagtgatcttcctaaagtatcaactcagccacgttctaaaaatgaaagcaaagaagataaaagagcaagaaagcaagctataaaagaagagcgcaaggaacgaagagtggagaagaaagctaacaaattagcatttaaactggagaaaagaaggcaagaaaaagagctgctgaacttgaagaagaatgttgagggtctaaagctatagacagtggagcatacagggcaaggcactttattaggggctcctcatctttggttattgactagaaacttcagaaagacaaaactgtttgccatttttactggcagataagaggaaaatacaatatttgtattatttttatactagtaagtgtcccctgccaaccatcttgtaaatattgtaatactttaatttttaatattataagcttacatttgctctgaagtaaatgacttcatgaatgtgaaatgtttgataaattaaaggaaaatatcttcataamaaaaaaaaaaaaaaaaaaaaaaaaaaaaaaaaaaaaaanaaaaaaaaaaaaaaaagggggn

SEQ ID NO: 110 - DNA, 1559 bp, Homo sapiens
tcgacccacgcgwcrctttgctacggagtgcatcggacgtcgaagcctagagtctctgcgtctttccctcttccgctgcctcattcctttccttcctagccttggtcgtcgccgccaccatgaacaagaagaagaaaccgttcctagggatgcccgcgcccctcggctacgtgccggggctgggccggggcgccactggcttcaccacgcggtcagacattgggcccgcccgtgatgcaaatgaccctgtggatgatcgccatgcacccccaggcaagagaaccgttggggaccagatgaagaaaaatcaggctgctgacgatgacgacgaggatctaaatgacaccaattacgatgagtttaatggctatgctgggagcctcttctcaagtggaccctacgagaaagatgatgaggaagcagatgctatctatgcagccctggataaaaggatggatgaaagaagaaaagaaagacgggagcaaagggagaaagaagaaatagagaaatatcgtatggaacgccccaaaatccaacagcagttctcagacctcaagaggaagttggcagaagtcacagaagaagagtggctgagcatccccgaggttggcgatgccagaaataaacgtcagcggaacccacgctatgagaagctgacccctgttcctgacagtttctttgccaaacatttacagaccggagagaaccatacctcagtggatccccgacaaactcaatttggaggtcttaacacaccctatccaggtggactaaacactccatacccaggtggaatgacgccaggactgatgacacctggcacagtgagctggacatgaggaagattggccaagcgaggaacactctgatggacatgaggctgagccaggtgtctgactccgtgagtggacagaccgtcgttgaccccaaaggctacctgacggatttaaattccatgatcccgacacacggaggagacatcaatgatatcaagaaggcgcgactgctcctcaagtctgttcgggagacgaaccctcatcacccgccagcctggattgcatcagcccgcctggaagaagtcactgggaagctacaagtagctcggaaccttatcatgaaggggacggagatgtgccccaagagtgaagatgtctggctggaagcagccaggttgcagcctggggacacagccaaggccgtggtagcccaagctgtccgtcatctcccacagtctgtcaggatttacatcagagccgcagagctggaaacggacattcgtgcaaagaagcgggttcttcggaaagccctcgagcatgttccaaactcggttcgcttgtggaaagcagccgttgagctggaagaacctgaagatgctagaatcatgctgagccgagctgtggagtgctgccccaccagcgtggagctctggctttgctctggcaaggctggagacctatgaaaatgcccgcaaggtcttgaacaaggcgcgggagaacattcctacagaccgacatatctggrtcacggytgttaaagttgggaggaggcccaatggggaa

SEQ ID NO: 111 - DNA, 585 bp, Homo sapiens
  misc feature (569): n equals a,t,g, or c
gatcgtgcccgggctgaggattcggcacgagcggcacgagttctcaggagccactcatctgctggcagaggtagcagaagaatgcccttagtgtaagtcctctacaaccatacaccaaatgtgctccctgcatttcaaattccattgtagaaagtctctgataatctcacttatactatgagccattcctcagtatctgtcctcttcctgttagtgttctacaattcctttctccttaatttttctccgctttacaaaatgtcacacagasaagtgcataatacttaaacaagcttttaaaaataatgctcataaatagctttggttctgtcataatattcgtatttataaacattttaagtcaattctcttcttttgttttcatttcagaaatatccatgtcctgaataaaagttgtgtcttgattagtttattatgtaacaatttagtgtgtttgacatttctaacttttatttctaacatttgctttattatagaacaataaacatgcagtgatgatttcttacwcagggagagtgagcaggactaaaactcygtgaatctcaggnaggtctgccaagcatc

SEQ ID NO: 112 - DNA, 2388 bp, Homo sapiens
  misc feature (2269): n equals a,t,g, or c
  misc feature (2296): n equals a,t,g, or c
  misc feature (2387): n equals a,t,g, or c
cccacgcgtccgaagcactgcctgtaaagccctcgcatgagaggccagcctgctagggaaatccaggaatctgcaacaaaaacgatgacagtctgaaatactctctggtgccaacctccaaattctcgtctgtcacttcagacccccactagttgacagagcagcagaatttcaactccagtagacttgaatatgcctctgggcaaagaagcagagctaacgaggaaagggatttaaagagtttttcttgggtgtttgtcaaacttttattccctgtctgtgtgcagaggggattcaacttcaatttttctgcagtggctctgggtccagccccttacttaaagatctggaaagcatgaagactgggctttttttcctatgtctcttgggaactgcagctgcaatcccgacaaatgcaagattattatctgatcattccaaaccaactgctgaaacggtagcaccygacaacactgcaatccccagtttaagggctgaagctgaagaaaatgaaaaagaaacagcagtatccacagaagacgattcccaccataaggctgaaaaatcatcagtactaaagtcaaaagaggaaagccatgaacagtcagcagaacagggcaagagttctagccaagagctgggattgaaggatcaagaggacagtgatggtsacttaagtgtgaatttggagtatgcaccaactgaaggtacattggacataaaagaagatatgagtgagcctcaggagaaaaaactctcagagaacactgattttttggctcctggtgttagttccttcacagattctaaccaacaagaaagtatcacaaagagagaggaaaaccaagaacaacctagaaattattcacatcatcagttgaacaggagcagtaaacatagccaaggcctaagggatcaaggaaaccaagagcaggatccaaatatttccaatggagaagaggaagaagaaaaagagccaggtgaagttggtacccacaatgataaccaagaaagaaagacagaattgcccagggagcatgctaacagcaagcaggaggaagacaatacccaatctgatgatattttggaagagtctgatcaaccaactcaagtaagcaagatgcaggaggatgaatttgatcagggtaaccaagaacaagaagataactccaatgcagaaatggaagaggaaaatgcatcgaacgtcaataagcacattcaagaaactgaatggcagagtcaagagggtaaaactggcctagaagctatcagcaaccacaaagagacagaagaaaagactgtttctgaggctctgctcatggaacctactgatgatggtaataccacgcccagaaatcatggagttgatgatgatggcgatgatgatggcgatgatggcggcactgatggccccaggcacagtgcaagtgatgactacttcatcccaagccaggcctttctggaggccgagagagctcaatccattgcctatcacctcaaaattgaggagcaaagagaaaaagtacatgaaaatgaaaatataggtaccactgagcctggagagcaccaagaggccaagaaagcagagaactcatcaaatgaggaggaaacgtcaagtgaaggcaacatgagggtgcatgctgtggattcttgcatgagcttccagtgtaaaagaggccacatctgtaaggcagaccaacagggaaaacctcactgtgtctgccaggatccagtgacttgtcctccaacaaaaccccttgatcaagtttgtggcactgacaatcagacctatgctagttcctgtcatctattcgctactaaatgcagactggaggggaccaaaaaggggcatcaactccagctggattattttggagcctgcaaatctattcctacttgtacggactttgaagtgattcagtttcctctacggatgagagactggctcaagaatatcctcatgcagctttatgaagccaactctgaacacgctggttatctaaatgagaagcagagaaataaagtcaagaaaatttacctggatgaaaagaggcttttggctggggaccatcccattgaccttctcttaagggactttaagaaaaactaccacatgtatgtgtatcctgtgcactggcagtttagtgaacttgaccaacaccctatggatagagtcttgacacattctgaacttgctcctctgcgagcatctctggtgcccatggaacactgcataacccgtttctttgaggagtgtgaccccaacaanggwtaagsacatcaccctgaaggagtnggggccawgyttkggaattaaagaagaggacatagatgaaaatccctgttttgaacgaagattttaaagaactccaactttccagcatccnc

SEQ ID NO: 113 - DNA, 2303 bp, Homo sapiens
gcaataaaatattgttagcattgtcataaatatgtcttttccaccggcgatggttgggtagttaagtgaataagctagaaagacatgtttataaagctatttgatgacaatctcaggcatatttatacagagatgttcttaactgtttgctacaaaaacatgaagatcaaaaactttcttgaagyttacgcttaacttatttggggaaacaaaactccagcccttcttgtgtatgttctgatatccctttgctctacttttagaggagtgaaccctaataggatggtagcagcattcttgtttctttatatctctcctctgtgattgtataccgttttttcaacttaaagcaacttcagctggaaatatgtagaggttggccaaggtgaactaaatagtctgtaacattgattagatatcaagcaacgtgagcatggtagcaaaagcactaactgaagccagtgatttaatttttaattctgattctgataattgatgatatagctcctcgaactttgttttttgttaaaacttggaaaatatatttgtattattttggacaaattatttgaactctctggaccttgattcaatttatatataaggtaaaggcattatactggattatcctgcaatttctttgagttgttagaatataatgtagcttattaatagcaatattagcagtgtagtagattctgactgcaaaacctagccttttctattgattcattagtggtagtaaaggtattatctgatttatcctttttaataggcagtgctttgatcaagtgggaaatagtaatggacaaataaaatcaatgatcattatctaacttgatgcctgcttttcaaaaagtgagcaaatttcacatcttcacccttagacattaattcatggcacctactataagtactcatcctcttcttacctatcttcttttctataggagataaagtggttattcagaccccccaatacaattttttggtttgttttcacagctacttaaaagattaaaataactattcttgcagatatttctaggaatatttttagaaataatatgaaatacagggataataggccaattatgatctttatttttaatttctacagaaaagtactagagaatatatctatagaaacttctttcagataaccctaaagatgatactagaatgtttataaaattattgagaagattatttgtgttataaagcttatttgtaccatagtaaaggatgtttttgttcctcttcattctgggctaatctgtcaatactgaagtccagtcttttcccccttttcttaccagctcaaccttgattcctgtgacccattctttctgatctttcgtagktcatagtcaccaggcatgagtaccttggatagscctctgaagtctgttaccacccagatttccaactcgggttaattggtactaattctattagctggtataaataatccaaaatctgtgcagactctgggagcaaaatgttctactcagtttggaatactgtgccttaaaatatatttcattgtaacagcaccttgtatatatagttggccaaggacagagttgttacaagttacgtggaactttcatagcaaatcttgacagtaaataccttgttcttgtattaggtctatatcctgaattgacctttagcaagaatctttagatctgctggagggctggsatggcttttggacttcagtgaaaaagaatttctgctactcattgttgataacgcttcagtactgtataaatgtttatccttttccacgtaatttgttttctatgatatgagaacttttattataatttgcctcagtcttgatagaatcttaacaaaaataaaatctgtggtcgtctgaggtattctccatgctataacccagtttagytgatgcatttgggagcttgggtgctgaaattaaatataacctatttgagttaaggatttattactagtgctccagtggtcacaggaacaataaaaaaggaacaacgatagaaatacgtgatytaggaaagaaggcaactgaaaaacctgaaagaaaaaaaatgaaagattaaaagtatacgatattctattttgatttagcaattacttgttttctagtgttctgtcaatttttggtgacttttataattacattaaaactaagatgctgaattaaaaaaaaaaaaaaaaaaaaaaaaaaaagggcggccgctctagaggatccctcgaggggcccaagcttacgcgtgcatgcgacgtcatagctctctccctagagtagtcgaaag

SEQ ID NO: 114 - DNA, 751 bp, Homo sapiens
  misc feature (667): n equals a,t,g, or c
  misc feature (733): n equals a,t,g, or c
  misc feature (748): n equals a,t,g, or c
ggcagagccctgattggacagtctcatcaagaaggttggtcaagagctcaagtgtttctgagaatctgggtgatttataagaaacccttagctgaatgcagggtggggagaacgaaagacaaaagcatcttttttcagaagggaaactgaaagaaagaggggaagagtattaaagaccatttctggctgggcagggcactctcagcagctcaactgcccagcgtgaccagtggccacctctgcagtgtcttccacaacctggtcttgactcgtctgctgaacaaatcctctgacctcaggccggctgtgaacgtagttcctgagagatagcaaacatgcccaacagtgagcccgcatctctgctggagctgttcaacagcatcgccacacaaggggagctcgtaaggtccctcaaagcgggaaatgcgtcaaaggatgaaattgattctgcagtaaagatgttggtgtcattaaaaatgagctacaaagctgccgcgggggaggattacaaggctgactgtcctccagggaacccagcacctaccagtaatcatggcccagatgccacagaagctgaagaggattttgtggacccatggacagtacagacaagcagtgcaaaaggcatagactacgataagctcattgttcggtttggaagtagttnaaattgrcaagagctattaamcgattgrgagagcacggccaagrccacacattccgggcaaggctnttttttcaaacgggnttg

SEQ ID NO: 115 - DNA, 3103 bp, Homo sapiens
ggcacgagctgatgcaatgaccagctaatggctcgattctcaagagggtttcattggtctcaacctggccccccaggcaacccacccctgattggacagtctcatcaagaaggttggtcaagagctcaagtgtttctragaatctgggtgatttataagaaacccttagctgaatgcagggtggggagaacgaaagacaaaagcatcttttttcagaagggaaactgaaagaaagaggggaagagtattaaagaccatttctggctgggcagggcactctcagcagctcaactgcccagcgtgaccagtggccacctctgcagtgtcttccacaacctgggtgaatctacttctcttaacaaagtctcaatgtcctatttgcaatttatgtggtaaacactgaagacaatggtccttaaccttttggcatctcagcctcctttcgaaagtcttgactcgtctgctgaacaaatcctctgacctcaggccggctgtgaacgtagttcctgagagatagcaaacatgcccaacagtgagcccgcatctctgctggagctgttcaacagcatcgccacacaaggggagctcgtaaggtccctcaaagcgggaaatgcgtcaaaggatgaaattgattctgcagtaaagatgttggtgtcattaaaaatgagctacaaagctgccgcgggggaggattacaaggctgactgtcctccagggaacccagcacctaccagtaatcatggcccagatgccacagaagctgaagaggattttgtggacccatggacagtacagacaagcagtgcaaaaggcatagactacgataagctcattgttcggtttggaagtagtaaaattgacaaagagctaataaaccgaatagagagagccaccggccaaagaccacaccacttcctgcgcagaggcatcttcttctcacacagagatatgaatcaggttcttgatgcctatgaaaataagaagccattttatctgtacacgggccggggcccctcttctgaagcaatgcatgtaggtcacctcattccatttattttcacaaagtggctccaggatgtatttaacgtgcccttggtcatccagatgacggatgacgagaagtatctgtggaaggacctgaccctggaccaggcctatagctatgctgtggagaatgccaaggacatcatcgcctgtggctttgacatcaacaagactttcatattctctgacctggactacatggggatgagctcaggtttctacaaaaatgtggtgaagattcaaaagcatgttaccttcaaccaagtgaaaggcattttcggcttcactgacagcgactgcattgggaagatcagttttcctgccatccaggctgctccctccttcagcaactcattcccacagatcttccgagacaggacggatatccagtgccttatcccatgtgccattgaccaggatccttactttagaatgacaagggacgtcgcccccaggatcggctatcctaaaccagccctgytgcactccaccttcttcccagccctgcagggcgcccagaccaaaatgagtgccagcgaccccaactcctccatcttcctcaccgacacggccaagcagatcaaaaccaaggtcaataagcatgcgttttctggagggagagacaccatcgaggagcacaggcagtttgggggcaactgtgatgtggacgtgtctttcatgtacctgaccttcttcctcgaggacgacgacaagctcgagcagatcaggaaggattacaccagcggagccatgctcaccggtgagctcaagaaggcactcatagaggttctgcagcccttgatcgcagagcaccaggcccggcgcaaggaggtcacggatgagatagtgaaagagttcatgactccccggaagctgtccttcgactttcagtagcactcgttttacatatgcttataaaagaagtgatgtatcagtaatgtatcaataatcccagcccagtcaaagcaccgccacctgtaggcttctgtctcatggtaattactgggcctggcctctgtaagcctgtgtatgttatcaatactgtttcttcctgtgagttccattatttctatctcttatgggcaaagcattgtgggtaattggtgctggctaacattgcatggtcggatagagaagtccagctgtgagtctctccccaaagcagccccacagtggagcctttggctggaagtccatgggccaccctgttcttgtccatggaggactccgagggttccaagtatactcttaagacccactctgtttaaaaatatatattctatgtatgcgtatatggaattgaaatgtcattattgtaacctagaaagtgctttgaaatattgatgtggggaggtttattgagcacaagatgtatttcagcccatgccccctcccaaaaagaaattgataagtaaaagcttcgttatacatttgactaagaaatcacccagctttaaagctgcttttaacaatgaagattgaacagagttcagcaattttgattaaattaagacttgggggtgaaactttccagtttactgaactccagaccatgcatgtagtccactccagaaatcatgctcgcttcccttggcacaccagtgttctcctgccaaatgaccctagaccctctgtcctgcagagtcagggtggcttttcccctgactgtgtccgatgccaaggagtcctggcctccgcagatgcttcattttgacccttggctgcagtggaagtcagcacagagcagtgccctggctgtgtccctggacgggtggacttagctagggagaaagtcgaggcagcagccctcgaggccctcacagatgtctaggcaggcctcatttcatcacgcagcatgtgcaggcctggaagagcaaagccaaatctcagggaagtccttggttgatgtatctgggtctcctctggagcactctgccctcctgtcacccagtagagtaaataaacttccttggctcctgaaaaaaaaaaaaaaaaaaaaaaaaaaaaaaaaaaaaaaactgcgtagggggggtcccggtgaccctaatcgcccgacgtg

SEQ ID NO: 116 - DNA, 888 bp, Homo sapiens
  misc feature (10): n equals a,t,g, or c
  misc feature (841): n equals a,t,g, or c
  misc feature (883): n equals a,t,g, or c
  misc feature (885): n equals a,t,g, or c
tggatccccnggctgcagattcgcactggtgagtcttactgttgcgggctccggggccgtcgaccatgccgctcgacctccacctccgctgggaagctgaggcgccgaacggctcccagagggtcccgggaagcgcatggtgttcaggcgcttcgtggaggttggccgggtggctatgtctcctttggacctcatgccggaaaattggtcgcgattgtagatgttattgatcagaacagggctttggtcgatggaccttgcactcaagtgaggagacaggccatgcctttcaagtgcatgcagctcactgatttcatcctcaagtttccgcacagtgcccaccagaagtatgtccgacaagcctggcagaaggcagacatcaatacaaaatgggcagccacacgatgggccaagaagattgaagccagagaaaggaaagccaagatgacagattttgatcgttttaaagttatgaaggcaaagaaaatgaggaacagaataatcaagaatgaagttaagaagcttcaaaaggcagctctcctgaaagcttctcccaaaaaagcacctggtactaagggtactgctgctgctgctgctgctgctgctgctgctgctgctgctgctgctaaagttccagcaaaaaagatcaccgccgcgagtaaaaaggctccagcccagaaggttcctgcccagaaagccacaggccagaaagcagcgcctgctccaaaagctcagaagggtcaaaaagctccagcccagaaagcacctgctccaaaggcatctggcaagaaagcataagtggcaatcataaaaagtaataaaggttctttttgacctgttnaaaaaaaaaaagaraaaaaaaaayycggggggggccggtacncnatt

SEQ ID NO: 117 - DNA, 446 bp, Homo sapiens
  misc feature (21): n equals a,t,g, or c
  misc feature (35): n equals a,t,g, or c
  misc feature (44): n equals a,t,g, or c
  misc feature (431): n equals a,t,g, or c
  misc feature (438): n equals a,t,g, or c
ggccttaagcttgggcctcanaagccctggaacantggggtaanttcccaactcctctttgtcctgtaagtttcctgaaatttccttaacaaagaaacatgtaataaagaaaatatgaacaaaaagttatttttataaaataaagggacacttcccaggcaatttcagtctttaagaaaagctaaggcttgtttggctttttgtttatttttaggtttttggtgtcctcatgacctaacctcatcccagtgagtagagactgggaggggagagcagcagctggagggcaggctgggagcgcttgtgagggagaggagctatggacgtctgcttctctgccaagggagagagtgaggtaggcctgggcccgctgacttcagggtgaggccacagctactgcagcgctttttatttatttatttatttactgngaatggnagctttgt

SEQ ID NO: 118 - DNA, 264 bp, Homo sapiens
  misc feature (262): n equals a,t,g, or c
ggcacgagcaaacttcacatagccaaacagttgaagagacctcatcataaatagactatcctatatcacagctaacgagaataaaaaaggaatgtggcatgaaagcataaaaataaaaacatctcagataataatatagagaaaaccaaaatacatgggctagaattccaccccagggactgtatcctcaaagacacaggtttttcttcctttttcttttttttttcttttcatgtttcagtactctgagcagctacaaaanga

SEQ ID NO: 119 - DNA, 571 bp, Homo sapiens
  misc feature (546): n equals a,t,g, or c
  misc feature (556): n equals a,t,g, or c
tggaaccctggccgagtccgaaaaaagccagatctggaaggtggctgcggaacggttttaagcggaagatggaggagccggaggaaccggcggacagtgggcagtcgctggtcccggtttatatctatagtcccgagtatgtcagtatgtgtgactccctggccaagatccccaaacgggccagtatggtgcattctttgattgaagcatatgcactgcataagcagatgaggatagttaagcctaaagtggcctccatggaggagatggccaccttccacactgatgcttatctgcagcatctccagaaggtcagccaagagggcgatgatgatcatccggactccatagaatatgggctaggttatgactgcccagccactgaagggatatttgactatgcagcagctataggaggggctacgatcacagctgcccaatgcctgattgacggaatgtgcaaagtagcaattaactggtctggaaggtggcatcatgcaaagaagtaagmamatgaccttctgtttctgacyctttcccttgagnaagtttcctngtatgtaacccttat

SEQ ID NO: 120 - DNA, 1299 bp, Homo sapiens
aaggtacgcctgcaggtaccggtccggaattcccgggtcgacccacgcgtccgctctgaggctctttccaacgctgtaaaaaaggacagaggctgttccctatggcagaaggcaaccacagaaaaaagccacttaaggtgttggaatccctgggcaaagatttcctcactggtgttttggataacttggtggaacaaaatgtactgaactggaaggaagaggaaaaaaagaaatattacgatgctaaaactgaagacaaagttcgggtcatggcagactctatgcaagagaagcaacgtatggcaggacaaatgcttcttcaaaccttttttaacatagaccaaatatcccccaataaaaaagctcatccgaatatggaggctggaccacctgagtcaggagaatctacagatgccctcaagctttgtcctcatgaagaattcctgagactatgtaaagaaagagctgaagagatctatccaataaaggagagaaacaaccgcacacgcctggctctcatcatatgcaatacagagtttgaccatctgcctccgaggaatggagctgactttgacatcacagggatgaaggagctacttgagggtctggactatagtgtagatgtagaagagaatctgacagccagggatatggagtcagcgctgagggcatttgctaccagaccagagcacaagtcctctgacagcacattcttggtactcatgtctcatggcatcctggagggaatctgcggaactgtgcatgatgagaaaaaaccagatgtgctgctttatgacaccatcttccagatattcaacaaccgcaactgcctcagtctgaaggacaaacccaaggtcatcattgtccaggcctgcagaggtgcaaaccgtggggaactgtgggtcagagactctccagcatccttggaagtggcctcttcacagtcatctgagaacctggaggaagatgctgtttacaagacccacgtggagaaggacttcattgctttctgctcttcaacgccacacaacgttcctggagagacagcacaatgggctctatcttcatcacacaactcatcacatgcttccagaaatattcttggtgctgccacctagaggaagtatttcggaaggtacagcaatcatttgaaactccaagggccaaagtcaatgsccacctwgracgatktcctgacagttttttacyctttctgggatttaatggagctcagcagccacctcttataatttaagggactcttgtcattgatttaaatttgcttcatcaagggggacg

SEQ ID NO: 121 - DNA, 1649 bp, Homo sapiens
  misc feature (1643): n equals a,t,g, or c
ccgattctacaggtcacggaaaaagcacttgatcaccacccagacagaacacaaatgtgtcttggactcctgccgttcactggaagctgagggctttcaggtcacctacctcccagtgcagaagagtgggatcattgacctaaaggaactagaggctgctatccagccagatactagcctggtgtcagtcatgactgtgaacaatgagattggagtgaagcagcctattgcagaaatagggcggatttgcagttccagaaaggtatatttccatactgatgcagcccaggctgttggaaaaatcccacttgatgtcaatgacatgaaaattgatctcatgagcattagtggtcacaaaatctacggtcccaaaggggttggtgccatctacatccgtcgccggccccgtgtgcgtgtggaggccctgcagagtggaggggggcaggagcggggtatgcggtctgggacagtgcccacacccttagtggtggggctgggggctgcgtgtgaggtggcacagcaagagatggagtatgaccacaagcgaatctcaaagttgtcagagcggctgatacagaatataatgaagagccttccagatgtggtgatgaatggggaccctaagcaccattatcccggctgtatcaacctctcctttgcatatgtggaaggggaaagtctgctgatggcactgaaggacgttgccttatcctcagggagtgcctgcacctctgcatccctggagccctcttatgtgcttagagcaattggcactgatgaggatttagcgcactcttctatcaggtttggaattggccgcttcactacagaggaggaagtggactacacagtggagaaatgcattcagcatgtgaagcgtcttcgagaaatgagccctctctgggagatggttcaggatggcattgacctcaagagcatcaagtggacccaacactagaagaatagggccctgactttgtgctggtctggcccctcctgcctcaccaacccgtgcacaaccagacaccttgttacacctagtggatgctctagattggtatagaccagttgacttcagcatcagtccacctctatgacagaaacacaagaaaactgtctttccctagcttcagttccttgggtgtggagcactccccatttcttctcgggtcttaaagtgtgtggacattttcatcccgaagccatagagacatttgctgtcatattgctgctgggcacatctgtgctcttggtgaggagagcaagaggaaccagaagaagtctctttggtcagggaccatgatgctctacatggacatttgagtcttcgtcttctgctgctgctcggctggaccagcttctttaacagcaagcataatccacttcaatgtaatattttctgtagctccaaaggctatctcttcatattgactgcagacagactgaatggacagtttcttagagggcttgtctcctttctacccttgtcctctttcctttcctttgacctaatggagctagaaatatgtctgtgactccaccagttattctaataatttgttttcttgaaaattgttaatttcaagactggagaaataaactcaccttctatttaaaaaaaaaaaaaaaaaaaaaaaaaattnctgcgg

SEQ ID NO: 122 - DNA, 2785 bp, Homo sapiens
  misc feature (1900): n equals a,t,g, or c
gagtcaacagaatcacttactgakgagggtacagacatgaatgaaggacaactactgggagactttgagattgagtccaaacagctggaagcagagtcttggagtcggataatagacagcaagtttctaaaacagcaaaagaaagatgtggtcaaacggcaagaagtaatatatgagttgatgcagacagagtttcatcatgtccgcactctcaagatcatgagtggtgtgtacagccaggggatgatggcggatctgctttttgagcagcagatggtagaaaagctgttcccctgtttggatgagctgatcagtatccatagccaattcttccagaggattctggagcggaagaaggagtctctggtggataaaagtgaaaagaactttctcatcaagaggataggggatgtgcttgtaaatcagttttcaggtgagaatgcagaacgtttaaagaagacatatggcaagttttgtgggcaacataaccagtctgtaaactacttcaaagacctttatgccaaggataagcgttttcaagcctttgtaaagaagaagatgagcagttcagttgttagaaggcttggaattccagagtgcatattgcttgtaactcagcggattaccaagtacccagttttattccaaagaatattgcagtgtaccaaagacaatgaagtggagcaggaagatctagcacagtccttgagcctggtgaaggatgtgattggagctgtagacagcaaagtggcaagttatgaaaagaaagtgcgtctcaatgagatttatacaaagacagatagcaagtcaatcatgaggatgaagagtggtcagatgtttgccaaggaagatttgaaacggaagaagcttgtacgtgatgggagtgtgtttctgaagaatgcagcaggaaggttgaaagaggttcaagcagttcttctcactgacattttagttttccttcaagaaaaagaccagaagtacatctttgcatcattggaccagaagtcaacagtgatctctttaaagaagctgattgtgagagaagtggcacatgaggagaaaggtttattcctgatcagcatggggatgacagatccaragatggtagaagtccatgccagctccaaagaggaacgaaacagctggwttcagatcattcaggacacaatcaacacccgaacagagatgaagatgaaggaattcctagtgagaatgaggaagaaaagaaaatgttggacaccagagcccgagaattaaaagaacaacttcaccagaaggaccaaaaaatcctactcttgttggaagagaaggagatgattttccgggacatggctgagtgcagcacccctctcccagaggattgctccccaacacatagccctagagttctcttccgctccaacacagaagaggctctcaaaggaggacctttaatgaaaagtgcaataaatgaggtggagatccttcagggtttggtgagtggaaatctgggaggcacacttgggccgactgtcagcagccccattgagcaagatgtggtcggtcccgtttccctgccccggagagcagagacctttggaggatttgacagccatcagatgaatgcttcaaaaggaggcgagaaggaagagggagatgatggccaagatcttaggagaacggaatcagatagtggcctaaaaaagggtggaaatgctaacctggtatttatgcttaaaagaaacagtgagcaggttgtccagagcgttgttcatctctacgagctcctcagcgctctgcagggtgtggtgctgcagcaggacagctacattgaggaccagaaactggtgctgagcgagagggcgctcactcgcagcttgtcccgcccgagctccctcattgagcaggagaagcagcgcancctggagaagcagcgccaggacctggccaacctgcagaagcagcaggcccagtacctcgaggagaagcgcaggcgcgagcgtgagtgggaagctcgtgagagggagctgcgggagcgggaggccctcctggcccagcgcgaggaggaggtgcagcaggggcagcaggacctggaaaaggagcgggaggagctccagcagaagaagggcacataccagtatgacctggagcgactgcktgctgcccagaaacagcttgagagggaacaggagcagctgcgccgggaggcagagcggytcarccagcggcagacagaacgggacctgtgtcaggtttcccatccacataccaagctgatgaggatcccatcgttcttccccagtcctgaggagcccccctcgccatctgcaccttccatagccaaatcagggtcattggactcagaactttcagtgtccccaaaaaggaacagcatctctcggacacacaaagataaggggccttttcacatactgagttcaaccagccagacaaacaaaggaccagaaggcagagccaggcccctgcgtccacctctgcctctacccgcctgtttgggttaacaaagccaaaggaaaagaaggagaaaaaaaagaagaacaaaaccagccgctctcagcccggtgatggtcccgcgtcagaagtatcagcagagggtgaagagatcttctgctgacyctcttcctctctgctgaggcagctgcctcctgatcctggccagcccacctctcctgctgtccccgcgtgcacaagtctcttacactggacgcccactgctcctcagcgtccagtcctcctgggcggccccagktcctggaacaataagcmacaratgatattgagttgt

SEQ ID NO: 123 - DNA, 1968 bp, Homo sapiens
  misc feature (39): n equals a,t,g, or c
  misc feature (1909): n equals a,t,g, or c
  misc feature (1942): n equals a,t,g, or c
  misc feature (1948): n equals a,t,g, or c
tcgacccacgcgtccgggcccgggccgagcctgggcgancgaagccatccactgcccgccctgctccgaggagaagctggcgcgctgccgcccccccgtgggctgcgaggagctggtgcgagagccgggctgcggctgttgcgccacttgcgccctgggcttggggatgccctgcggggtgtacaccccccgttgcggctcgggcctgcgctgctacccgccccgaggggtggagaagcccctgcacacactgatgcacgggcaaggcgtgtgcatggagctggcggagatcgaggccatccaggaaagcctgcagccctctgacaaggacgagggtgaccaccccaacaacagcttcagcccctgtagcgcccatgaccgcagtgcctgcagaagcacttcgccaaaattcgagaccggagcaccagtgggggcaagatgaaggtcaatggggcgccccgggaggatgcccggcctgtgccccagggctcctgccagagcgagctgcaccgggcgctggagcggctggccgyttcacagagccgcacccacgaggacctctacatcatccccatccccaactgcgaccgcaacggcaacttccaccccaagcagtgtcacccagctctggatgggcagcgtggcaagtgctggtgtgtggaccggaagacgggggtgaagcttccggggggcctggagccaaagggggagctggactgccaccagctggctgacagctttcgagagtgaggcctgccagcaggccagggactcagcgtcccctgctactcctgtgctctggaggctgcagagctgacccagagtggagtctgagtctgagtcctgtctctgcctgcggcccagaagtttccctcaaatgcgcgtgtgcacgtgtgcgtgtgcgtgcgtgtgtgtgtgtttgtgagcatgggtgtgcccttggggtaagccagagcctggggtgttctctttggtgttacacagcccaagaggactgagactggcacttagcccaagaggtctgagccctggtgtgtttccagatcgatcctggattcactcactcactcattccttcactcatccagccacctaaaaacatttactgaccatgtactacgtgccagctctagttttcagccttgggaggttttattctgacttcctctgattttggcatgtggagacactcctataaggagagttcaagcctgtgggagtagaaaaatctcattcccagagtcagaggagaagagacatgtaccttgaccatcgtccttcctctcaagctagccagagggtgggagcctaaggaagcgtggggtagcagatggagtaatggtcacgaggtccagacccactcccaaagctcagacttgccaggctccctttctcttcttccccaggtccttcctttaggtctggttgttgcaccatctgcttggttggctggcagctgagagccctgctgtgggagagcgaagggggtcaaaggaagacttgaagcacagagggctagggaggtggggtacatttctctgagcagtcagggtgggaagaaagaatgcaagagtggactgaatgtgcctaatggagaagacccacgtgctaggggatgaggggcttcctgggtcctgttccctaccccatttgtggtcacagccatgaagtcaccgggatgaacctatccttccagtggctcgctccctgtagctctgcctccctctccatatctccttcccctacacctccctccccacacctccctactcccctgggcatcttctggcttgactggatggaaggagacttaggaacctaccagttggccatgatgtcttttcttctttttcttttttttaacaaaacagaacaaaaccaaaaaatgtccaaaaaaaaaaaaaaaaanaaaaagggggggccggtaccaattcgcctatantgatcntttacaatcatggccgcgtt

SEQ ID NO: 124 - DNA, 1705 bp, Homo sapiens
  misc feature (773): n equals a,t,g, or c
ttttttccggtagttaggccagctgaggcggtttgtaagttttgggtcgcagtatgctagaattttgaggctcccttctgatgaaaattgagctgtccatgcagccatggaacccgggttacagcagtgagggggccacggctcaagaaacttacacatgtccaaaaatgattgagatggagcaggcggaggcccagcttgctgagttagacctgctagccagtatgttccctggtgagaatgagctcatagtgaatgaccagctggctgtagcagaactgaaagattgtattgaaaagaagacaatggaggggcgatcttcaaaagtctactttactatcaatatgaacctggatgtatctgacgaaaaaatggcgatgttttctctggcctgtattcttccctttaaatacccggcagttctgcctgaaattactgtcagatcagtattattgagtagatcccagcagactcagctgaacacagatctgactgcattcctgcaaaaacattgtcatggagatgtttgtatactgaatgccacagagtggkttagagaacacgcctctggctatgtcagcagagatacttcatcttcacccaccacaggaagcacagtccagtcagttgacctcatcttcacgagactctggatctacagccatcatatctataacaaatgcaaaagaaagaatattctagagtgggsaaaggagctttccctgtctgggtttagcatgcctggaaaacctggtgttgtttgtgtggaaggnccacaaagtgcctgtgaagaattctggtcaagactcagaaaattaaactcggaagagaattttaattcgccatccgagaagacattcctttygatggtacaaatgatgaaacggaaagacaaaggaaattttccatttttgaagaaaaagtgttcagtgttaatggagccaggggaaaccacatggactttggtcagctctatcagttcttaaacaccaaaggatgtggggatgttttccagatgttctttggtgtagaaggacaatgacatcaagagtagttgaaagtatcttgccactgttggccttttgatttttttttcccactttttcttgaaagattaagtaattttattttagttccattctagaatgttggggagtggggcacaagaaaaaatagtatagctgaaatgyatctgttaaaaatgtcatgattgaaagcagaactgagtttcaaattacaaccttaaaattgttgttagatatttcttcacatatcagctgcccattttgaaaaagaaattatccataaaggtaatgttggtgctccaatttgccagccattcccaacccccttctcccttacctgccttcactaaagaacccagaaaagctaattgctcccctttcagcctctgttgcaactaacaactctcagtggcctcaggacacagctttggccttgggaattctgggaaaacttttacttcctgattaaagatacatatgcagctaggccacctcctcccccccttactgccataaacaccaaagtgatgactggagctggaggagttatttgaaccacgacggaagggccaagagaaccacgaagatgccagttgccacattgttgagctgctgacccaacaccagccattgcctgtctctaaacatcttatgaaataaaaccarttttgtttaaaaaa

SEQ ID NO: 125 - DNA, 2381 bp, Homo sapiens
  misc feature (2354): n equals a,t,g, or c
  misc feature (2363): n equals a,t,g, or c
  misc feature (2370): n equals a,t,g, or c
  misc feature (2378): n equals a,t,g, or c
cccagcattgccccccccacgtttcagcacagcgctggccgcagtctgacaggaaagggacggagccaagatggcggcggccgacggcgacgactcgctgtaccccatcgcggtgctcatagacgaactccgcaatgaggacgttcagcttcgcctcaacagcatcaagaagctgtccaccatcgccttggcccttggggttgaaaggacccgaagtgagcttctgcctttccttacagataccatctatgatgaagatgaggtcctcctggccctggcagaacagctgggaaccttcactaccctggtgggaggcccagagtacgtgcactgcctgctgccaccgctggagtcgctggccacagtggaggagacagtggtgcgggacaaggcagtggagtccttacgggccatctcacacgagcactcgccctctgacctggaggcgcactttgtgccgctagtgaagcggctggcgggcggcgactggttcacctcccgcacctcggcctgcggcctcttctccgtctgctacccccgagtgtccagtgctgtgaaggcggaacttcgacagtacttccggaacctgtgctcagatgacacccccatggtgcggcgggccgcagcctccaagctgggggagtttgccaaggtgctggagctggacaacgtcaagagtgagatcatccccatgttctcyaacctggcctctgacgagcaggactcggtgcggctgctggcggtggaggcgtgcgtgaacatcgcccagcttctgccccaggaggatctggaggccctggtgatgcccactctgcgccaggccgctgaagacaagtcctggcgcgtccgctacatggtggctgacaagttcacagagctccagaaagcagtggggcctgagatcaccaagacagacctggtccctgccttccagaacctgatgaaagactgtgaggccgaggtgagggccgcagcctcccacaaggtcaaagagttctgtgaaaacctctcagctgactgtcgggagaatgtgatcatgtcccagatcttgccctgcatcaaggagctggtgtccgatgccaaccaacatgtcaagtctgccctggcctcagtcatcatgggtctctctcccatcttgggcaaagacaacaccatcgagcacctcttgcccctcttcctggctcagctgaaggatgagtgccctgaggtacggctgaacatcatctctaacctggactgtgtgaacgaggtgattggcatccggcagctgtcccagtccctgctccctgccattgtggagctggctgaggacgccaagtggcgggtgcggctggccatcattgagtacatgcccctcctggctggacagctgggagtggagttctttgatgagaaacttaactccttgtgcatggcctggcttgtggatcatgtatatgccatccgcgaggcagccaccagcaacctgaagaagctagtggaaaagtttgggaaggagtgggcccatgccacaatcatccccaaggtcttggccatgtccggagaccccaactacctgcaccgcatgactacgctcttctgcatcaatgtgctgtctgaggtctgtgggcaggacatcaccaccaagcacatgctacccacggttctgcgcatggctggggacccggttgccaatgtccgcttcaatgtggccaagtctctgcagaagatagggcccatcctggacaacagcaccttgcagagtgaagtcaagcccatcctagagaagctgacccaggaccaggatgtggacgtcaaatactttgcccaggaggctctgactgttctgtctctcgcctgatgctggaagaggagcaaacactggcctctggtgtccaccctccaacccccacaagtccctctttggggagacactggggggcctttggctgtcactccctgtgcatggtctgaccccaggccccttcccccagcacggttcctcctctccccagcctgggaagatgtctcactgtccacctcccaacgggctaggggagcacggggttggacaggacagtgaccttgggaggaaggggctactccgcccacgtcagggagagatgtgagcatcccgggtcactggatcctgctgctgtaatgggaacccctcccccatttacttctccacctcccgtcctccccatcattggtttttttttgtgtgtcaactgtgccgtttttattttattccttttattttcccccttttcacagagaaataaaggtctagaagtaaaaaaaaaaaaaaaaaaaaaaaaaaaaaaaaaaaaaaaaaaaaaaaaaaaaaaaaaaaaaaaagggggggccgcttnaagaggttncccccgngggggccnaag

SEQ ID NO: 126 - DNA, 1713 bp, Homo sapiens
  misc feature (1653): n equals a,t,g, or c
  misc feature (1710): n equals a,t,g, or c
  misc feature (1711): n equals a,t,g, or c
  misc feature (1713): n equals a,t,g, or c
gagaagcayggctcaccagccagcctctgtggtctttgtaattagaagcttcagaactcactaatactactgtacctttcattggcgcattaccccataaaactttttgagacgaggtgagatctgagtataaagataggtcagaagtattttaaagggcttaatgtgccaaaaagaaaaaaagctagagaccctttttgcaaacatttggtgaccacacatttgagggaagacgtggcgttaggtgaagcagaagcaaaccctgctcttaggggctcacctaggtgagtgcacagcctgtgacgctacagggagaggctgagtaaaccgagatccagcgttctgtatggcaggggtattgcttatcacagaggttctgaagagtaggaagtacataatgaagagggctttaaaaattgccaacaaagtgagtcaccagggctggcagtagtgtgacggggctgtcctgagctgttaggagagtagatgcggggagggctggtgacctccgtgggtttatatgtcggaaactcttctctccaaatcccaggcctggcttccagcaccatccagctgtgcccaagaagccaccctggtctgttctccaactcttttaaatggtgcccaacttttctaagtgagcttagcaatgagaagaaaaaaaaacatgaattctttttctggaaaatcagggagacatgggtaataataggtactaataaatatttatagatgagtgaatgaggaaataattacatcaaaaaggtcagtgacaattgataaatgacaaggaaatatttaattaggtaaaactaaatcattgctctctatactaggatagactttatctacttcatctgttcctaagtcagcatgttagttctggggaaggatcataagaaaggaaatactttttaaaaaaaaatttggaaacatgtaacaaagcaagggtaaaatatatatatatatctatataagtsctgtgactgtaaaagtgtactttccattaattattagccgagttaagagaatggtcacattgaagtactgtgtggactagaaatgtaccctgtcatcatgcaatgaaatattgttatcgttttaacatagctcatttatgtagaatgaattctggtggtttaccccaagtcacagttaggacggtagatggtgagatcgcagatgcgctattatctagattcagtgttacattttcgatgtttatcactcagtgggtttttattaatatgctgattaagttatttactgggccagtcattgtgctaaatagttgctcttttgtgtttcattgccttgatgtttgagtgtaatctagcattttaatacagtgtttattttgcatgatctttaacaaatgttttaagcaattttaaaaaggcaggatgttattgacattatacactgaagtcttaacattttaacatttatagtgcttatttgcaaaattgtataattaggaattatttcagagacaatgttttctttttcaggtgagtagttgccgcgtaatatcattggagtacattctttatactgtttgtgaaattaatactagcatattaagtgtacaaatagatttagaaaacaataaaaaattgcatgctattctgacctcaggaatttttattcacnaaggatgattcacattttggattaaaaataaaagtagttgtgtgttaaaaaaaaaannan

SEQ ID NO: 127 - DNA, 1514 bp, Homo sapiens
  misc feature (26): n equals a,t,g, or c
  misc feature (80): n equals a,t,g, or c
tttatgagatcgcctaccctgtaagnccagttggattaccgggaataccttgaaagttacctttcctacccactattagnaaatatgaagtcgcatgcactggatatcctatatatcattaggtttttgttgtgtttttggttatgctgtcccccttctccttggggagatatttgggagcaaacttatttagatttagagtaaacttttcattatagagcaagtaaaaacagacaaatgaaacaacctagtgtttcacataaaaatacttctgacataaagtaccaagagcagtgtgaatatacttggcatagtcaaaaaagaaaatacatttaatattagttcaaaattgttaaaaatacctttagaaggtctagtctattattgaaaactcaattttttcacttatatggctttaaaatggagctattttgctacaatataatgtattgtttatttttttaagttatttaatgttaatatacatagctagacttaaggtttttcagaaagatgtccataataaatattaaaaacaatggtatttttwaaaaaactgccttagggttttaaaaccttccctacagttataaccacgtgtaattttgtggaaatgatataacagctattaatactactataacataggcataaatattttcgtgtttatatgcatatacaagttaaaataattagaaactatgactgcgcctagtaaagtcatctaggtttatagttcagtagcttaggcaaggcacacactgctcatctccgctttttagggtcagaggaacacaagctcrtgttctgagtgaagggcgtacactggcacctggtgttgcctagatcccccatctcctccttccagccaggtctggaagtttcaacagcccaagcttaacttcatgtaaagtcttcactgccagtgggaacatctttgacacaacaagacactccaattgtgatttgagttgaggatctctgcctgccttcctgccgtccttccttcttccccgatccatgctacttttaggggctgcggagagcagcagcagagctgagtaatgatacagggcaccacggagagaaagtagaaccatttcactcctgggaagatggggtatttcccacttccagcaacgaaataacaaatgaaaagttgcatacttattgatgtattgtatgagccagtagcattttatgtacaaaacagaagtcaatgcaacagtatgtatgtgtgcctgtgtgtgtataaaaataaccattgaagctaacttgctaatgtacttaggcaagccacttcccatctctgggcctcgtctttcctccctctaaaatcaaagagctgaattatgtgatccttgaggtctcttccacttataataccaactgtcttgtcagactggcaaattatattggcctctccttatgtggtggttttyttggtaggtcatagttccttatacacagacacctgcatcatcgaaggtctttttttcctaaaaaaaaaaaag

SEQ ID NO: 128 - DNA, 2049 bp, Homo sapiens
cactaggatacaaatgaagcttaattactaaaatgtaattcttgacactctttctataattagcgttcttcacccccacccccacccccaccccccttattttccttttgtctcctggtgattaggccaaagtctgggagtaaggagaggattaggtacttaggagcaaagaaagaagtagcttggaacttttgagatgatccctaacatactgtactacttgcttttacaatgtgttagcagaaaccagtgggttataatgtagaatgatgtgctttctgcccaagtggtaattcatcttggtttgctatgttaaaactgtaaatacaacagaacattaataaatatctcttgtgtagcaccttttactggtagattagtgccttaatttcctggcctgccattttggttgattgcyaaggcaattttttctaatcytagggaatcattcagtagatgcgattaaaaaactaatgttgggtcaatttttttcttcattttcagcacaagaagtcctcttatatcctactaaatacattcctaaaaatgtatttgaacattggttctgtaaaagataatggactaaaaaagtagagaggagttgtagagatcttaaatcattctggaattcctaattatgcttcaatttttagacataattttagataatttatttccagtgttttctgcatgttctcatttgttctttttctcagttgaatgcaccaactggtttgagtcctgtgagcattcagtcagttgaaattaaagattcctcatttctcctgatttctattcttgtctcaatcttaaatttagagaccagttgtttttatgatatcagccatttgatttttttcattttctatttaagaaatatgaagaaaaaatacaccaagatggtcaaattactacacaaatcagcaccagcacagtctgatagctgcaaatgtccattcatctgctgtgtatgtatatccagaatcagcataggaagtcgttcaggatatcagtatataatgcacagaagtgtgggttgtttgaaagccaaacaggaaaattaggagcctcctggattgacatttcagtgatccctctaaccagtttatggattattatgaataatagtgtagtgtgttctttttcagaagttatatttgataatagagaagggagttttatggaagtttctttgaagatttttttttttccatttcgaatcagattatagcaacaatggagtttggaagtttgtatggcctataatgttctaagttccagaatgaaaagatctgtaacaatctgaatagatgtggacacatatagcagagagaactatgtaaattatcttgcagaacaaaatagaagggtcctaaatcacgttaactcaaacattgtagactagctttgtgtttattcttcaggtccttgcgccttatttggttttgtatattcaacgaactgaaatatttggaattcctatttctacgtatttggtggtccataagactttgtcaaatgtaaacctacagtttgatamgctttaaaatacctagttaagaggatgatttctctttaatcgtttaaatgttctgaaaattaaaatcttttgaggcacatgaagtgggcaccatatatcatctagagtccttactggtattcaggatgaaaatgttcacgctgcattaattgtcatttttctctcccatgttctttctcactttgatacgttaatactgataatggataaagagtgagtttttataataaatggttttggaaaggtattcataggaaccgcggttatttacttaaggttatggagtaaactagcttggaccttgggctgcaggacgactaggattcacccataacgacacagtgccctatgtttcttaacttcttgttgccatttgaaactctgtactcttatgtttaaagggttctgtatagccattttttttttcagaaagttacattgctttgtatagaaataaaaggcattattaaaatttgcttgttaaaaaatgaaaaaaaaaacggcacgag

SEQ ID NO: 129 - DNA, 1266 bp, Homo sapiens
  misc feature (120): n equals a,t,g, or c
  misc feature (1222): n equals a,t,g, or c
  misc feature (1235): n equals a,t,g, or c
  misc feature (1243): n equals a,t,g, or c
cgggacctgtacaccctgaagtggactctatccctcccccttccaccgggarcaacttcagcccttacctgtttgccagccgtgaaccacctgctgtgaaggcccgaccacccacccagnaatctgsccagtycccacttcttccctgccacgcgtgtgtgtgcgtgtgccacgtgagtccaaagtcccctgccccccaagccagccagacccagacattagaagatggctagaaggacatttaggagacatctgcctctctggccctctgagatatcccgatgggcacaaatggaaggtgcgcacttgcccctactattgcccttttaaggccaaagcttgaccccattggccattgcctggctaatgagaacccctggttctcagaattttaaccaaaaggagttggctccaaccaatgggagccttcccctcacttcttagaatcctcctgcaagagggcaactccagccagtgttcagcgactgaacagccaataggagcccttggtttccagaatttctagagtgggtgggcatgattccagtcaatgggggaccgcccgtgtctaagcatgtgcaaaggagaggagggagatgaggtcattgtttgtcattgagtcttctctcagaatcagcgagcccagctgtagggtggggggcaggctcccccatggcagggtccttggggtaccccttttcctctcagcccctccctgtgtgcggcctctccacctctcacccactctctcctaatcccctacttaagtagggcttgccccacttcagaggttttggggttcagggtgctgtgtctccccttgcctgtgcccaggtcatcccaaacccttctgttatttattagggctgtgggaagggtttttcttctttttcttggaacctgcccctgttcttcacactgccccccatgcctcagcctcatacagatgtgccatcatggggggcatgggtggagcagaggggctccctcaccccgggcaggcaaaggcagtgggtagaggagcactgcccccctttcctgccccctcctcatctttaataaagacctggcttctcatctttaataaagacctgtttgtaacagaaaaaaaaaaaaaaagggcgggccgctctaagaggatccctcgagggggcccaagctttacgcgtggcatggcgaacgttcataagctctcttccctatagtggagtcgttatttatnaagctaagggcangggccgtncgttttttaaaacgttcgttgaa

SEQ ID NO: 130 - DNA, 1095 bp, Homo sapiens
  misc feature (1068): n equals a,t,g, or c
  misc feature (1081): n equals a,t,g, or c
  misc feature (1095): n equals a,t,g, or c
gtcatttcggagcgactcagcgcctgcccgccctctcgccgcgtcgccggtgcctgcgcctcccgctccacctcgcttcttctctcccggccgaggcccgggggaccagagcgagaagcggggaccatgttccgacgcaagttgacggctctcgactaccacaaccccgccggcttcaactgcaaagatgaaacagaatttagaaacttcatcgtttggcttgaagaccagaaaatcaggcactacaagattgaagacagagggaatttaagaaacatccacagcagcgactggcccaagttctttgaaaagtatctcagagatgttaactgtcctttcaagattcaagatcgacaagaagctattgactggcttcttggtttagctgttagacttgaatatggagataatgctgaaaaatacaaggatttagtacctgataattcaaaaactgctgacaatgcaactaaaaatgcagaaccattgatcaatttggatgtaaataatcctgattttaaggctggtgtgatggctttggctaacctgcttcagattcagcgtcatgatgattacctggtaatgcttaaggcaattcggattttggttcaggagcgcctgacacaggatgcagttgctaaggcaaatcaaacaaaagagggcttacctgttgctttagacaaacatattcttggttttgacacaggagatgcagttcttaatgaagctgctcaaattctgcgattgctgcacatagaggagctcagagagctacagacaaaaatcaacgaagccatagtagctgttcaggcaattattgctgatccaaagacagaccacagactgggaaaagttggaagatgaacacttgaggacttcagcttctcacctacttagtacagttgggaaccatacacttctggcatgtttggaaatcaaaatgtcacattctcgggggaggaagcccagaaaattgggtatgttctagagatttaccaccattgcttattgcttttttctttaataaagtttaggaaagtagaaaaaaaaaaaaaaaactcgggggggggncccgtacccattnggcctttggggggn

SEQ ID NO: 131 - DNA, 2890 bp, Homo sapiens
  misc feature (2886): n equals a,t,g, or c
gtcccactttaggcaaaagtaggaaactgaatatatcagaatgaaacatctatttttttcataaagaagatcatataatatgtgaaagaactttgaaaggatgaggcattatataaatgcaagaatataaaagataaacaggaagtctaatgtgaacaatatagatgyttyattctgatatattcagtttcccactttaggcaaaagtagattaatagaatgacgaattcaaagtagatgaggaaaatcaggcacagagaagtaaaggtagggatagacccaaatttacacaacaagataatgacatctccagcttttaagttgatcatcaaaggctgggctggatttgtcttgctgtatgtgtcaggaaatttatacctattacattttccattttctcaaaatttaagtcacatgactaatatttagctgcaactttcctcataacaaatagtgtcatgaagaatgttgtagtgtgaagtttgtacatttcagggtcagatatacaatatgaactcttaatctacaggaatgagaatggaggatcattgaaggccatgatataaacaaatttgcatgttgaagcctgtataaaacatggtacagtgagtgaatatacccccatccccaagaacactttatacatattaaatggatatatgattactgtgcaaaaattcattctggaaatgaacatatatttgagcactaatatgtaatgtacacctgccctaaggagaaaataaattataaaactttttacattcaaaattactttcccaagcatgtcttagaataatctatgtgttgatgcatgtaaattgtactttaggtaggcaaagaaatctggttatttatgtaaaaactagtctaataaagttagttagtggctttatcactttaaatctttagtgtccaaaagtggtgtttaaagtaatagcacatcagaaaaccttgtctggacaaaactagttcactcactgcttctgcacctgcagttgctccctttagggttataaaataatgacccaaatgttacatgtgttgatattataacttgtcagttactgatgtctgtggtatcctaccctcatctctgaaagggataatactgaataattattagaaaactataaaacttcacactttgtaccattaaaacctaaaattttaatcttgtccttttttactatggatcagtcggcactcgggaacagcagcaaggaaaaaaagcaaatttcattcacatgttctgtgttcatacctcttctctacctaattgttcatttaaatttcagccttattccttgataagggattttaccacatgaagtcatccagtgaccctagctcttattgtgaagttagtggagtatacttagaaatgttacaactttaaaatgttacaaaacattcattaaagctcatatttaaagtagagcatctagtttgagaaatagaaatcaattattaaagatgtcttttttctacccatttaactagttaaaaccatgacatgtaaatgtagaagtagaataatcatagaattccctaaaatatttctgtttactaacatatattgaccaagtacatcaagcaggagagatcttccttcattctgttatagtccacatcattctaattttgctcagttgttattaagagcatattcctaaaccatacacttttgtttcaataaagttttattttgttgagatgaataaaataacaaagttataagctgcataagacaaaagttcaattgttcaaaaaaaatttactgggatagctttctattacaggtattgttagattatattgtgctgataagattactttctaaaaaatttgtacttttctgtaaattaaaagaatatggagtcataaaatggcaagtgttttaggattagcctaaaattggacattgtcattgatttcaaagaaggtatgaactagcagtcttacagcctaattcttctttggactggtccttggcagcagttccttttcagactcgataaacagaattcagatgatgtaagtcaaaacaaaactttacaaagccaagcgtattatcttttgcattaacctatttttttccatcatacatgctactagtatgtgcattagcatgatattctcatatacattgcattaaaaattaaaaggtggcagctcagggtgagctcttctgttgctcatttgttcctaaatttttaagggctttttctcagtcaatagtttgtacaaactggttagtttaacttcattacccatttcattaaagttgatgggtcgtgtgatgagatgcatttaaggccgatagtgatagatgttttttttatttcttgaacacaggctttgtctgaatgatgttcttttatctcttgaacacaagctttgaatgataactacaggttttaagtgctgttacattaataccataatgtgatgtgttagaaacaaagggatatttcaaaggtagatatttgaaaattctctagtctcaatatgtatgtgtattgaatatactctaaaaataaatgtgcaatttgctagtaggacaatgcagtgactgactagcattaggtatgtttcttttatatcctagctatgtcccactttcttctaagtgcaatcctttcatgttcacttgctgttttaccccatctactctaacttcatttggaaggcttgtctagagtatagcatgtatttttacctttgcagtgaattgcatgtgctaattgtaaccacagctatttttatgttgacataactccaaatgttatattaaatgttctattatatattagctctaatcccttaagtaaattttaagaaataaatacttgttcaaattttaaaaaaaaaaaaaaaaaaaanaaaa

SEQ ID NO: 132 - DNA, 567 bp, Homo sapiens
  misc feature (567): n equals a,t,g, or c
gcctccctcccctggtcctcatatgaacaggagaaagaagcgcttacccactctttccgggaggccagttctacccagcaggagaccatagacagactgacctcacagctggaggctttccaggccaaaatgaagagggtggaggagtccattctgagccgaaactataagaaacatatccaggattatgggagccccagccagttctgggagcaggagctggagagcttacactttgtcatcgagatgaagaatgagcgtattcatgagctggacaggcggctgatcctcatggaaacagtgaaagagaaaaatctgatattggaggaaaaaattacgaccctgcaacaggaaaatgaggacctccatgtccgaagccgcaaccaggtggtcctgtcaaggcagctgtcagaagacctgcttctcacgcgtgaggccctggagaaggaggtgcagctgcggsgacagcttcagcaggagaaggaggagctgttktaccgggtccttggggccaatgcctcgcctgccttccctctggcccctgtcactcccactggaaaggggggn

SEQ ID NO: 133 - DNA, 786 bp, Homo sapiens
gcgaccgcctggtgcagtaccgcggcgaggtgcasgccatgctcggccagagcaccgaggagctgcgggtgcgcctcgcctcccacctgcgcaactgcgtaacggctcctccgcgatgccgatgacctgcagaagcgcctggcagtgtaccaggccggggcccgcgagggcgccgagcgcggcctcagcgccatccgcgagcgcctggggcccctggtggaacagggccgcgtgcgggccgccactgtgggctccctggccggccagccgctacaggagcgggcccaggcctggggcgagcggctgcgcgcgcggatggaggagatgggcagccggacccgcgaccgcctggacgaggtgaaggagcaggtggcggaggtgcgcgccaagctggaggagcaggcccagcagatacgcctgcaggccgaggccttccaggcccgcctcaagagctggttcgagcccctggtggaagacatgcagcgccagtgggccgggctggtggagaaggtgcaggctgccgtgggcaccagcgccgcccctgtgcccagcgacaatcactgaacgccgaagcctgcagccatgcgaccccacgccaccccgtgcctcctgcctccgcgcagcctgcagcgggagaccctgtccccgccccagccgtcctcctggggtggaccctagtttaataaagattcaccaagtttcacgcaaaaaaaaaaaaaaaaaaaaaaaaaaaaaaaaaaaaaaaaaaaaaaaaaagggcggccgctcgcgatctagaactagtcc

SEQ ID NO: 134 - DNA, 1221 bp, Homo sapiens
aattcggcacgagtccagctactcgagaggccaaggcacgagaatcacttgaacccaggaggtggaggttgcagtgaactgagatcacgccattgcactccagcctagctaaaaaattgccaaagaatgaaccacaaaatccaggagcaaattctgccagaggaagaggagtagaccttaccgaacccacacaaccaaccaggaatcagtgttgtagtaactaaacctctagtttgaactagctggaatagtcttctgcttcctaaatgttaataacaatggaattggagcatttaaccagcccagtatgacttccaaaagaagagacttatgatagagtcaagtttctaatacagaattattttaagtgttttgaacttaatttttaataacatgcatgggtccctctcactaatgtttcaacaatagggaaaaatgagaactatgtggacacttgtttcattggaaggttagggggaataatttctcatcactaggaatatagacaaatgactgtctgggcccacacagttaaccagcccatttctccacactggtacagtagtcacctgtgaaaaaaaaaattggaacttactaatttgggcttttcaaaaacattctttgtttagaaggagattctaaagttatttatgatgcttagccatagtattcaggcaaatgttcatttctcctggtacctgtatttaaaatgtacattccacattttaataaattaaccacaagaaaataatcccacatatacaaggtcaggggtggggaagagtattaatggtatcttaattatacccagtctggttttttttttttaaatggggtaaaaatcaaatgcaaccccatcttgttttaggaattttgagaactaataaatgcaccttaatggtcagtgttcctttcaaacatgtgagttctttaacaaaaatgaaataaaccaggtgtctgtgatttctaattaatcaccgctggccattacacaggttttgttgtttggggtggggagggggcttttgttcccttttgacataatatagtcaatgcactaacaattatgtatattcaaacttgattattttaaattcgatcttcagctgtactgtaaatagggtactgcattgtagtctccatatctgtattacttttctgtaatatttaagagttgctaaaagcatacaaaatgtactgttactaaaacagctaattatt

SEQ ID NO: 135 - DNA, 1921 bp, Homo sapiens
  misc feature (40): n equals a,t,g, or c
  misc feature (107): n equals a,t,g, or c
  misc feature (1880): n equals a,t,g, or c
aattgtggttaatgttacctttatcttgttgaggaccacnacatttagcacggtgccttgtgccagaatagatactcaatatgtgaatatgtgtctactagtagttnaattggataaactggcagcatccctggcctgttgtcatgcagttcatttcctgttaattctgggagacaatgatttcacaactagagggaagcagtcctaaaagtttaaaatccgataaggaatatctgggacagggtttagatcatgactctacacagataccatgatgagagtatattaaagaaatttaggaaagcacctggttcctttctccccatgcctgccttctgctccctccccagctggtttgggctcaaattgtccctggagactagggtttatgttagggtattgatagattagagcaggtggttgaagagatcttctctggtcagacttggaagaatttccaaaactgaagttagccccaagacttccctagggttgatgtactttatgatccagatgctaaacttcttagaatgaaaatatgcttcaacacttaagtagcatacactgccctacaaacctcagagagcacttttccccaagttcttgtttttatttttgaaagtactcacacagcacttactatgctccaaacactcctctaagcactttacacatattagctcattcagtccccagacagacgggatgaagtaggtattgttactgttcccattttacaggtgagagatttgaagcctggggaggctagtaactcaccccaaggtcacacggctcatacatggtgggactgagactcagatgcaggcagtctggcacctcagtctggattctaaccatttcactaagctatttttgtcttgtactactttgacccacccctgaataaacctcaattgctggagtggggtgtagttattaaagggatgctttttaccttttgctgtctgctgtggcagattccccagataaccaaggaaaaggggccacccatacctggaaataggccatagggcccctactactgccaacaagccatggcctaccttgacacttgtttgatcttaaaattgtgtcttggtaacaaaagatttggacaggcatatctgtagctttcaagttaattaattgcaatatttttttcttcaggattttagctgctgaacaactttcagtttggagctaaaagagacctgtctcatggtctgcccttccctggggcaatagctagggtctttcctgatttttatggaattttaggggatattttgagctttgggttctcagtagtgaattgagacttggaggtgacttttcatgtttggagtatcatctctgtctgggatctgggctgacaaattaaaacctagagtagtgcttatgctgaaatgatacttttcattttttggttgatttttttgccttcccttcaattttaaactgaagcattttaatrtgggtagaaactctacaccaaatacactaaacattttggtgcttagtggatttctttttaggtaactggtacttacttccaaagactgaatacaagccacactccatcatatcccttaaacttcatgaaaaaccattcaagatccccttgctgcaacactgttctcttcttctctactaaattctatttccaaaattggtaatagagccagaaggatccccagtacccagccctctgcctggcacaaastggtaggcacaattaaattcagtatggggtgggagcatgggtacagtcttgggtgccataggaagggagtaggttgscataggtcacacattcatttgataagttgggatgttcccttacatagggggaacacaaatttccggggtttttggggggnggggttaggtagtgactaaggccgccagatttgaggtggcc

SEQ ID NO: 136 - DNA, 1003 bp, Homo sapiens
  misc feature (1001): n equals a,t,g, or c
aaactcgactcactatagggaaagctggtacgcctgcaggtaccggtccggaattccgggtcgacccacgmgtccgggggtgagtggtacccaacgggccggggcgccgcgtccgcagaagaggcgcggggtgcaggcttgtaaacatataacataaaaatggcttccaaaagagctctggtcatcctggctaaaggagcagaggaaatggagacggtcatccctgtagatgtcatgaggcgagctgggattaaggtcaccgttgcaggcctggctggaaaagacccagtacagtgtagccgtgatgtggtcatttgtcctgatgccagccttgaagatgcaaaaaaagagggaccatatgatgtggtggttctaccaggaggtaatctgggcgcacagaatttatctgagtctgctgctgtgaaggagatactgaaggagcaggaaaaccggaagggcctgatagccgccatctgtgcaggtcctactgctctgttggctcatgaaataggttttggaagtaaagttacaacacaccctcttgctaaagacaaaatgatgaatggaggtcattacacctactctgagaatcgtgtggaaaaagacggcctgattcttacaagccgggggcctgggaccagcttcgagtttgcgcttgcaattgttgaagccctgaatggcaaggaggtggcggctcaagtgaaggctccacttgttcttaaagactagagcagcgaactgcgacgatcacttagagaaacaggccgttaggaatccattctcactgtgttcgctctaaacaaaacagtggtaggttaatgtgttcagaagtcgctgtccttactacttttgcggaagtatggaagtcacaactacacagagatttctcagcctacaaattgtgtctatacatttctaagccttgtttgcagaataaacagggcatttagcaaactaaaaaaaaaaaaaaaaaaaaaaaaaaaaaaaaaaggggggggggncc

SEQ ID NO: 137 - DNA, 878 bp, Homo sapiens
  misc feature (50): n equals a,t,g, or c
  misc feature (840): n equals a,t,g, or c
tcgacccacgacgtccgcccacgcgtccgtggggactccctcgggcaccngcgactgcccggacccgggggaggtccctgaatatcccccttactaccaggaggaggccggctactgaggctcccagcacgctctctccccacatcgtctccccatctgggtttttgggtttttctgtgttttcatcttttttttttttcttaacccgttcagtgctgccagtcaaccaagggtctgtgagtgtcagcgtgggatcaggcagcagagcttttttcccctttgccttgatccttcgcaaggctgagccactgggctgtgggggaaggggtcaaggccatatcccaatacgtgtagggcgagggtccctgctggcacattcaggctgtgctgggaagaagagacctgggcttggaaggaaccggtccccgacggtttctggttgcctcgcctcttcccccttttgtcagctgagcagtttgtggtttctatgcccgcaagtttcaggaagtattcacaaaagaaaaatacattttttcccccaggggtggggcaaggacagtggagagagtgctaggaaatgagtcccctgggaaaggggaccgggccgtgatgttaaatatctccggctcccaagtgactggatttgcctaggaccttcagatcaacagacttcagaccctcagacctgccccggggccaggtggagaaagtgagggccgtacaaggaagtgaaattctgagttgttggggctaagcctgaccccctctccatgctccccgccccaactcactctggcctcagtagatttttttttcagttgtggttgttgcccaggcttngagtgcagtggcgccatcttggcttcactggcaacttt

SEQ ID NO: 138 - DNA, 2505 bp, Homo sapiens
  misc feature (1907): n equals a,t,g, or c
  misc feature (2151): n equals a,t,g, or c
ggtgatgaaatattatcttgtgttagagttaggaataggaactaacctgtaggagcatgtccccaaatggacatttgaatggactaacaaaaacaactggaaagactgaatttccgacacaaaggaatgatgggatcaaaaagaaagcagtgaggagttcttgagtcttgtagtacctattcttattttaacttgcttcatccttgatctacctgagacactaagaaggaaattagttttccaagagctctttgaacctgtctaggactgtagttaaacctatttgccctatgggggttcttcacactcgaaaaactatttccttatcaccaacgacccacccagaaaggccaatgaggccaaatgtaacaatttttaacatttaaatataactattaaaattgcattaattgtgaacagtgaattaaagggttgtcttctccaggagacagtatgtggcacttttcgtaaatttcatttaatatataaaaatttaaatcactcactgcaacatgcatttaaaatcttccaagaaggtagaggtatcattttctgttttgctttgttttaaaacagttgcctcaagcttctgtcttaagagtagtgacttagaatccagatatcttttgttttagaaaaacaagcaaaactatgttgcaagactgacagttgtaatgtttatttgccacagatcaaaggttcacaaagtatatcaaatttacatctacttggggtaccttgatagattattattgtttttcttttatctttcccttcaggaatttggaaactcgttgtcactttttytaattttaaaaatactaaattgtaatagttttcttttgccaaatgtgtgcgtacatattcaaagcaatgaaactatttcaagccatacaaccacaggggtgggaaccttttcacaaattttaatgtgtttgtatgtaaatagatgtttgtatgaaatattttcatgatagaatgaatatatttaaatgaagttgaattattccagtgctacttaaacacattacaaaaattttggtgagaattatctgagtctattgagatgtaatgcagatcaattttgatttttaaaaatcaaaagcctacaataactctgactctcagcaacttcctcggcgttgttgcacctgacgtggagagagctcgtaggcttccccagtgcctcagccgcttcctggtggaagttaggtgctaatggaggtgtgttcaccttttagtgatatcactgcaggcctttgaggggcctgagagtgaatcagaggcattagagacaccggtgcagttatctggagcacaatttctttgcagggcagcagaatcagaagccagacttggccatgtgaacctcgaaactcggtttcccggccgccatcaaccgccacccttactgcctagtcacacacgtcagggaggctgccctcagtggagttggggttgagaccccagggtgggacttcacagttttgccagcaatctctaccttctgacttctgcctcgcagagaggaaggagaggggagcatctggcaaggggcccatttctcagcacagtacatttcctgtctcagctctggaagactatgcacccaagcaccaaacttccaaccagagagagagacgtcctccgataacaaaaatccttgcttcctctgtctgtgactttacacacagttgttcaaagttgttaaatgtcaagagtcaatcacatccctaggacatacctcccaactctcctgactcttatgttattgaaaaaacaaacaaacaaaaactcctttatgatgatattcaacttgagtggggttttttttccactttggtcctggatataatgaaatgatacatattaggataaattttcactgtgtatagtagcaatacgancacacatgccaatgtatcaacatatctacttggttacattttggtttatgataattaaccttgattcatgtattgggaagctacagggactacgtaatacctgcttatcacataggaaaattatgtccatgattctgagctcccttcttcaaaagtttcctcctgggtgttctatgttctctctttatcctgaaatacatttattaggttgtgaggtatgttgaagaagtagaagccaggggtnatgctttcagcatttattgcaaccaaaagttaaccccatcacggttaacgagcatctttggtctcttgtggaatttgaactaaaactatgagccttattcaatatctataattctatgatttttttaaattatgggaaattaatgaaagatgtttacatgaataatgtttgcccttactgtgttatgaatgagttttttgtagtgtgtctgggtgcatgatgcaagagagtaggaaaaatgtttctgaaacaaaacttgacaaatatttgtaatgaaagtaaatttaaagattgctataattgcgctatagaaacaatgcaagtattaaacaaaatatacaatcaaaaaaaaaa

SEQ ID NO: 139 - DNA, 272 bp, Homo sapiens
  misc feature (126): n equals a,t,g, or c
  misc feature (189): n equals a,t,g, or c
gtagagggcgccccctgccccaccagtcctgtagtgccccgccttcaccccgtagctgggcatgggcctggcccctcgtgcatttgcccttttctcggctacagctgtggacgttgccctcggggnaggtcgaatggtaccccattccccctgccctgcccgcccccagcctccccacccaggccggcnacctggccatccccattccgttcttcttcatgtaataaatgttttaatttctgaaaaaaaaaaaaaaaaaaaccggggggggg

SEQ ID NO: 140 - DNA, 1592 bp, Homo sapiens
  misc feature (1568): n equals a,t,g, or c
  misc feature (1578): n equals a,t,g, or c
ggcagagctaccagggggtcaggatgcgggcggtggagccctctggcctttgtgtggtagccgaggactctgtgtcagcgaccgttttccgggaaacttccgggcgagactcacatcttggaaattcaaatactcaatagctctcgtaattctagggaatcttgagaagaggcctggattaaggattcaaacgtgggccctcagatggccccgcacctgccgcttgcacctgcagccccgcgctctacccggttcaagcatggctgaccaggcgcccttcgacacggacgtcaacaccctgacccgcttcgtcatggaggagggcaggaaggcccgcggcacgggcgagttgacccagctgctcaactcgctctgcacagcagtcaaagccatctcttcggcggtgcgcaaggcgggcatcgcgcacctctatggcattgctggttctaccaacgtgacaggtgatcaagttaagaagctggacgtcctctccaacgacctggttatgaacatgttaaagtcatcctttgccacgtgtgttctcgtgtcagaagaagataaacacgccatcatagtggaaccggagaaaaggggtaaatatgtggtctgttttgatccccttgatggatcttccaacatcgattgccttgtgtccgttggaaccatttttggcatctatagaaagaaatcaactgatgagccttctgagaaggatgctctgcaaccaggccggaacctggtggcagccggctacgcactgtatggcagtgccaccatgctggtccttgccatggactgtggggtcaactgcttcatgctggacccggccatcggggagttcattttggtggacaaggatgtgaagataaaaaagaaaggtaaaatctacagccttaacgagggctacgcyaaggactttgaccctgccgtcactgagtacatccagaggaagaagttccccccagataattcagctccttatggggcccggtatgtgggctccatggtggctgatgttcatcgcactctggtctacggagggatatttctgtaccccgctaacaagaagagccccaatggaaagctgagactgctgtacgaatgcaaccccatggcctacgtcatggagaaggctgggggaatggccaccactgggaaggaggccgtgttagacgtcattcccacagacattcaccagagggcgccggtgatcttggggtcccccgacgacgtgctcgagttcctgaaggtgtatgagaagcactctgcccagtgagcacctgccctgcctgcatctggagaattgcctctacctggaccttttgtctcacacagcagtaccctgacctgctgtgcaccttacattcctagagagcagaaataaaaagcatgactatttccaccatcaaatgctgtagaatgcttggcactccctaaccaaatgctgtctccataatgccactggtgttaagatatattttgagtggatggaggagaaataaacttattcctccttaaaaaaaaaaaaaaaaaaggggattccgatatcaagctgtgggaaaaccgtnggacctcganggggggggcccggt

SEQ ID NO: 141 - DNA, 842 bp, Homo sapiens
cgggcgcgaggcggccaccgtggagagcagagcgcggcggctggaagctgctaagtcagagccgcgatgttccggattgagggcctcgcgccgaagctggacccggaggagatgaaacggaagatgcgcgaggatgtgatctcctccatacggaactttctcatctacgtggccctcctgcgagtcactccatttatcttaaagaaattggacagcatatgaagacaggacatcacatatgaatgcacgatatgaagagcctggttacagtttcgactcctctctgcaagtgaataggcccagaaaggtgtaagagactctttgaatggacataaaattctgcttgttaagaacaagtttggctctggtaactgaccttcaaagctaaaatataaaactatttgggaagtatgaaacgatgtctcgtgatctggtgtacccttatccctgtgacgtttggcctctgacaatactggtataattgtaaataatgtcaaactccgttttctagcaagtattaagggagctgtgtctgaaatggcactgtcttgtcagtcatttctgtttacctttttcttctgcccagagtgtatttgtgaagagtctcttatattatgttttgtggaaatcagcacacaaccacaatgacatttaagcacaggatcattattagtctatgtttttaataaacatatcaattaagaaaagttgggtttctatttttcttatcctactttttgctgcaaaccaacaatcactagtgagacttgtattatattgagattattgcaagcttcagtaagttcatcttgttttggactagagaatttgccaatcctgaa

SEQ ID NO: 142 - DNA, 3203 bp, Homo sapiens
  misc feature (910): n equals a,t,g, or c
aaaaaaggggaatgcccaaccagccartcarcaagtgamgtcccgcctttcctccgtttccattggtcccagccatgcggaggtcgctcccatgggaagccgagcttccggctgccaggctttggcccgggcgctttcggattgggagggcttcctccatggaacgcgagcctcgagacgtctgacgttaggcaccgttcgcagcgcctcgggctcgcacggcaggatcgaaagcgtgattggctggcggcgtctgtggtctcggcaccgcccagtccgggacgctgcctctgcggaactgggggtggggcgtgttgacccccttaaaggcgccagagcccgcggtcacggctcargttcccggtgcttcgcgcgtctgccgttgtcacaagccarggargtggcaccaccaggcgaagcttggcgagattgtgtcgtcaagcgcgtacgggcgccaattggccgggcgatgtggcgtggactggcgctggcgcgacgattggctgcgcggcccgggggcggggccagtgggcggtgcgmgccgcagactgtgctcaaagcgggcgccatccgggaccgcggttgtctgtggccggaggtgatcagtgttctagaacagatcagacattttgtaatgatgcctgaaataaacactaaccacctcgacaagcaacaggttcaactcctggcagagatgtgtatccttattgatgaaaatgacaataaaattggagctgagaccaagaagaattgtcacctgaacgagaacattgagaaaggtgctgctttgaaacagtctttcttgtaaagcgatttgtgtaggcatttccgatttgctgagaagagcactctgttcaaggaagtgcagtcttcagtaataccgtattttctcgttggttccagttcgttnaaatagtgtggtcattagcatctgctttgctgtcttcctgttacagcgatttctcttcacttcatgcctgttactcggcttcttcagagttattctggattcatagaagagggactakycctgacatacagcagcagcctagcctctaatatttctagagagtggagagaggcgggcaccatgcagggaagcgtgtgccttcaccactttccgagaactgaatgtccttgatagggaacttgactgccggaaaggggccaccagcatcaccatttccttcactcgacggccaacttccttgcccagtgcagagctcttcctcaccatagccatgcagagactatgcatgtggataaaccatgggaaaaagcaaaagcagcagcaagttactaatgttattctgaactgcagggagagaatttggcaaataactggtacttaaggstaaaataattggtatttctttgctttcaggattattgcatcgagcttttagtgtcttcttattcaacaccgaaaataagcttctgctacagcaaagatcagatgctaagattacctttccaggttgttttacgaatacgtgttgtagtcatccattaagcaatccagccgagcttgaggaaagtgacgcccttggagtgaggcgagcagcacagagacggctgaaagctgagctaggaattcccttggaagaggttcctccagaagaaattaattatttaacacgaattcactacaaagctcagtctgatggtatctggggtgaacatgaaattgattacattttgttggtgaggaagaatgtaactttgaatccagatcccaatgagattaaaagctattgttatgtgtcaaaggaagaactaaaagaacttctgaaaaaagcagccagtggtgaaattaagataacgccatggtttaaaattattgcagcgacttttctctttaaatggtgggataacttaaatcatttgaatcagtttgttgaccatgagaaaatatacagaatgtgaatatgtaggtaaatgattacagaaaaatttatctgcttaacaaacttagaatgactttttccttttaaatttagttctatcattaatttatcattaaatttagttctatcatttggtactatcattaatgtattatatacactgatactttaaaacttgtgtggaaaaaactaacttataattttgtatcacacaccctggatatgtgttctgtttctaagcgacatttgtgagagattattgtaaaatgagagcgagcaaataaaacttaatttaatctttgcagatacatacttatgggaaatttgaacaaatgagtgaaactctgtgtttttagtaggctgtgataaacatttccggagcacttgcagaggacttgctatttgccaggtgctttatgtatcattaaatttttctcatagttcagaaaaatgtgcaaaggaaactattgtctcgctccttcaaaacagtcttaattaactttcatattagcagattaaactagcagagcaggttcaagggaaattaaatgatatggaccctaatttgtatcattctgagttgattgtgtggtttattcattctggaaacatgttgatacttacagtcagccactgcttttgataagtgatattgattaggttgaatcttcttgtaaatagtatttaccagttagcaaagtctgtgttttcagaattacagtgagcacagaggtgttcataaaatgggaattgagtcccactcggtaagagttgcttaaacttgacactgttgacatttgggctggataaaacccctgtggtggggtctgtgctgtgcattgcaggatggtgagcagcgtccctctcatgtgacacccacagttatgccggatgttgccagatgcccctaggggacagagtcaacccccaactgaggaccactgtcctacagagtcaggaaatattgtagggagaaaaaaataacaacaacaaaggcctgtgttaatgttaaatagatgagattatggaatgtgtatattaatgttaaaaattgtaccttgatcaatgtactttttataaacttgccatagatatctcagatttgaaacctcaagacagatttattattcttaaatgctgtatgataatgaagaaaaataaaaatttatttcttgcaaagttaaatgtttgttaaattcaatagaatgactcatttatggttaactttgggcaatttataatttcagacaagactgtttagcaagtattttattgaaaagtaaaaaaaattgcaat

SEQ ID NO: 143 - DNA, 3474 bp, Homo sapiens
  misc feature (1909): n equals a,t,g, or c
  misc feature (1929): n equals a,t,g, or c
  misc feature (2862): n equals a,t,g, or c
  misc feature (3399): n equals a,t,g, or c
ggaattccgggaagagagggaagaaaacaacggcgactgggcagctgcctccacttctgacaactccaaagggatatacttgtagaagtggctcgcaggctggggctccgcagagagagaccagaaggtgccaaccgcagaggggtgcagatatctccccctattccccaccccacctcccttgggttttgttcaccgtgctgtcatctgtttttcagaccttttggsatctaacatggtgaagaaaggagtaaagaagagaacaaagtaactcctgggggagcgaagagcgctggtgaccaacaccaccaacgtcaccaccagctcctgctgctgcggccacccacgtccaccatttaccgggaggctccagagggtaggcagcggatccgagaaaggagcgaggggagtcagccggcttttccgaggagttatggatgttggtgcattcacttctggccagatccgcgcccagagggagctaaccagcagccaccacctcgagctctctccttgccttgcatcgggtcttacccttccagtatgttccttctgatgagacaatttccagtgccgagagtttcagtacaatgtggaaatggatactgacacattgtgcctcagcctttccccacctgcccggctgctgctgctgctgctttttgttgctgttcttggtgtcttccgtccctgtcacctgccaagcccttggtcaggacatggtgtcaccagaggccaccaactcttcttcctcctccttctcctctccttccagcgcgggaaggcatgtgcggagctacaatcaccttcaaggagatgtccgctggagaaagctattctctttcaccaagtactttctcaagattgagaagaacgggaaggtcagcgggaccaagaaggagaactgcccgtacagcatcctggagataacatcagtagaaatcggagttgttgccgtcaaagccattaacagcaactattacttagccatgaacaagaaggggaaactctatggctcaaaagaatttaacaatgactgtaagctgaaggagaggatagaggaaaatggatacaatacctatgcatcatttaactggcagcataatgggaggcaaatgtatgtggcattgaatggaaaaggagctccaaggagaggacagaaaacacgaaggaaaaacacctctgctcactttcttccaatggtggtacactcatagaggaaggcaacgtttgtggatgcagtagaaccaatggctcttttgccaagaatagtggatattcttcatgaagacagtagattgaaaggcaaagacacgttgcagatgtctgcttgcttaaaagaaagccagcctttgaaggttttggtattcactgctgacatatgatgttcttttaattagttctgtgtcatgtcttataatcaagatataggcagatcgaatgggatagaagttattcccaagtgaaaaacattgtggctggggtttttggttgttgttgtcaagtttttgtttttaaacctctgagatagaacttaaaggacatagaacaatctgttgaaagaacgatcttcgggaaagttatttatggaatacgaactcatatcaaagacttcattgctcattcaagcctaatgaatcaatgaacagtaatacatgcaagcatttactggaaagcacttgggtcatatcatatgcacaaccaaaggagttctggatgtggyctcatggaataattgaatagaatttaaaaatataaacatgttagtgtgaaactgttctaacaatacaaatagtatggtatgcttgtgcattctgcctkcatccctttctatttctttctaagttatttatttaataggatgttaaatatcttttggggttttaaagagtatctcagcagctgtctnctgatttatcttttcttttnattcagcacaccacatgcatgttcacgacaaagtgtttttaaaacttggcgaacacttcaaaaataggagttgggattagggaagcagtatgagtgccggtgctatcagttgacttaatttgcacttctgcagtaataacacactaataaatatggcaatgctgtgccatggcttgagtgagagatgtctgctatcatttgaaaacatatattactctcgaggcttcctgtctcaagaaatagaccagaaggccaaattcttctctttcaatacatcagtttgctccaagaatatactaaaaaaaggaaaattaattgctaaatacatttaaatagcctagcctcattatttactcatgatttcttgcaaatgtcatggcggtaaagaggctgtccacatctctaaaaacctctgtaaattccacataatgcatcttccaaggaactatcaagaattggtatgaagcgcaactctccagggcttaactgagcaatcaatatatactggtatatgtgtaacatatacaaaaactgttctagctgtatgatctagtcttacaaacaataaaactgtttctgtaaatttaaagagcttacargttccataatgtaaccatatcaaattcattttgttagagcasgtatagaaaagagtacatagagtttaccaatcatcatcacattgtattccactaaataaatacatagccttatttgcagtgtctgtagtgattttaaaaatgtagaaaatactatttgttctaaatacttttaagcaataactataatagtatattgatgctgcagttttatctcatatttcggttkgaaaaagcattttaggttgacacatatttgtacaaaaaaagactcactaaatgtgtcttactaaagtttaacctttggaaatgctggcgttctgtgattctccancaaacttatttgtgtcaatacttaaccagcacttccagttaatctgttatttttaaaaattgctttattaagaaattttttgtataatcccataaaaggtcatatttttcccattcttcmmaaaamctgtatttcagaagaaacacatttgaggcactgtcttttggcttatagtttaaattgcatttcatcatactttgcttccaacttgctttttggcaaatgagattataaaaatgtttaatttttgtggttggaatctggatgttaaaatttaattggtaactcagtctgtgagctataatgtaatgcattcctatcmaaactaggtatctttttttcctttattttaaaataataattgcacctgacacataaacatagaccacccacaaccaaaattaaatgtttggtaagacaaatacacattggatgaccacagtaacagcmaacagggcacmaactggattcttatttcacatagacatttagattactaaagaggctatgtgtaaacagtcatcattatagtactcnagacactaaaacagcttctagccaaatatattaaagctttcagaggccccaaataggaaacatctccctgtctct

SEQ ID NO: 144 - DNA, 3283 bp, Homo sapiens
  misc feature (99): n equals a,t,g, or c
  misc feature (1884): n equals a,t,g, or c
ggtcgtgtgcggctcggggtaatagggctgctgctcggccggccggcggcggcgtarcagcaggggcatgagggctaacccgggaagcggcagctgagncgggccgggaggagcgccggtccccgtggatcccgagagtgcagagctcggggcaggggccgggaggcgtgggggagccgggccctcccctcaggaacgtgtcccggggccgacccggcccgtagtgtggaagcagcttcaggtaggtgagctcgtgaaacaatatgaagaggagaaaatagccttttaaggaaattggcccacagaaaggatggccttcttggacaatccaactatcattctagctcatattcgacagtcacatgtgaccagtgatgacacgggaatgtgtgagatggttctcattgatcatgatgttgacctagagaagattcatcctccttcaatgcctggagacagtgggtcagaaattcagggaagcaatggtgagactcagggctatgtatatgcccagtcagtcgatattacctcaagttgggactttggtattagaagacgctcaaacacagctcaaagattagaacgactccgaaaagagagacaaaaccagatcaaatgcaaaaatattcagtggaaagaaagaaattctaagcaatcagcccaggagttaaagtcactgtttgaaaaaaaatctctcaaagagaagcctccaatttctggggaagcagtcgatattatctgtacgsctagaacagtgccctctgcagctgaataacccttttaacgagtattccaaatttratggcaagggtcatgtaggtacaacagcaaccaagaagatcgatgtctacctccctctgcactcgagccaggacagactgctgccaatgaccgtggtgacaatggccagcgccagggtgcaggacctgatcgggctcatctgctggcagtatacaagcgaggacgggagccgaagctcaatgacaatgtcagtgcctactgcctgcatattgctgaggatgatggggargtggacaccgattttcccccgytggrttccaatgagscccattcataagtttggcttcagtactttggccctggttgaaaagtactcatctcctggtctgacatccaaagagtcactctttgttcgaataaatgctgctcatggattctcccttattcaggtggacaacacaaaggttaccatgaaggaaatcttactgaaggcagtgaagcgaagaaaaggatcccagaaagtttcaggttcaagggcagacggggtttttgaggaggattcgcaaattgacatagccacagtacaggatatgcttagcagccaycattacaagtcattcaaagtcagcatgatccacagactgcgattcacaaccgacgtacagctaggtatctctggagacaaagtagagatagaccctgttacgaatcagaaagccagcactaagttttggattaagcagaaacccatctcaatcgattccgacctgctctgtgcctgtgaccttgctgaagagaaaagccccagtcacgcaatatttaaactcacgtatctaagcaatcacgactataaacacctctactttgaatcggacgctgctaccgtcaatgaaattgtgctcaaggttaactacatcctggaatcgcgagctagcactgcccgggctgactactttgctcaaaaacaaagaaaactgaacagacgtacgagcttcagcttccagaaggagaagaaatccgggcagcagtgacactggcctccagcctcaatctgttccgtagctcagagcctgcctgccagggccaagtgccctagagcccacccggtgtcctgaagtcctcggggggaggccagcccctggntcactggcacagggcaggtgggctctcggggaaggtgtcgggggccccctaggagggagcgctggggacattgccatgggacggaagtctgcttggcagtggctttgataagcgatgcttgggggtcagaccaccccctagaggagccacgtgccgcccagccaccttcaatgcctgccaccctgcccgaggatgtacagagccgtgcccacacatttccttgcaacttgatcaaatttcttaaagcaaacaacaaaaatgtacatttctgtttttccttttaataaacaggtgtactctttatcatggttggtatgatggaccattctttggggcggaggattgattatgttactctctttaaaatctgttcccatattgaacaggcagattggaaaagctatggttcgatttctcagaagaaatgtttaggtcttagtcaatagttttaactatgccatttgtttaaatgagtgcatttgcttcgagggtagtgtcttactaaaagttaggaacagagacctagtggtgtgtccaaggccgtgtcactttccccttcagcacaccccagcttctgacctcagagcccaggagctgcgtggacagtgtggggtgccaggaggaggggcggtggctggtcctcaggcacgctgcactcccagccagacatggtctttccgtttcttaagtagcaagtgtaggtttcagctggcagttccacctgcatgttctctgcttcgctgccttggaagggsccacattccccattcctcttctccttacagcgcctgcctcctttttcaagcaggcggaaagctgctgtttctcacgtttcagggagaggggtgagcggagggagacctgtgtccgtgccgtccggctccctgggtgggaacaggcaagggatcagatgcccctgacaccacgcctctggccacaccagatgcctctgcagtcctcgacagcctcttcagtgtccctcctgcggtgatgtccttactgtccccagccagggccggggaccggtgtttcactgaggacctgcattagaaacattttttaaattgttgtacaggaagagatgtgtctaaaacagcatcttaaagctgagtgtatttctttgcacaaggggtcatgctgatgaattcttctttcattctgatctttgttcagccaacaggagcgtccttttctaatgtcttccattcctaccccccacccaaaaacaaaagaaatatttgtagcttgctatctgtatttgaatttttagcaattttatatttagatactttgaaaaatgtaaatgactaatttggtcattaaatcttgtgacatattcgatattaaaatgatattaaaataaaagtcatataaatacaaaaaaaaaaaaaaaaaaatt

SEQ ID NO: 145 - DNA, 1818 bp, Homo sapiens
  misc feature (1267): n equals a,t,g, or c
  misc feature (1798): n equals a,t,g, or c
  misc feature (1812): n equals a,t,g, or c
ttttgaattcagacctggaatgtaagtaagtgacaatgcttatggaaagccagttagttagaattggaaayctgycytgtcattttacaagcattagawtcctttcctgtgtgaaraaagcctcagtgaaacaggtctttgccataactttatgaagtgctacagaaagcacaaagaattgattcatgttcatcaatacctgctgagagtactgtcccaggaatatccagtggatggattcatcatccaggaggttcaaaagtaagatggttttcaaatcatttttgagactggttgcataacagcagggtacctgaaagagccttctgggagttagtgaactaggtagattgttttgttcacataacgccaccatcaacttaaagtgaattgtctttgttataaatgaggtcactatggacttaccctaaagatcttctgtacttctgtcttccataggacaaatgataagtactacatacctcatctcttgggttattattgtagtcttgcattcatgrttatgaatttaaaaataaataccaattatggaaatagtactaaaggcttgcgcgcatgaaacattaattggtttaaagtccctttataaagagtgctacatggtttagataaaggaaacatataactattgagttacaggggattttattaattataaaatgcaatcaatttaaattaygtaggtttaagactagtcccttggataagccccaagcgaatttgtcttcagattattaaaattagtgctgtaaatcagggtgggcaattcacagcctttctgaactgactgaactagagcttgcagtgaagtgttctgctgagactgagcaccttacagatatttttctccagaagatggtgctgggtaataaaatcatcacaattagggaatggttagtggtctctactgtggcaaatgccaactgttggaattcactttattgtagaaaaacccaaactgagactcttaagttttgtttagcaatgtgtttctggtatgaaacaaactactgtgtcactgtccaggtaggaaacaattctttcaactgggttttcagcataaatgggaactgatgtagaaggcaggatttagcccttctaggcaaaagaaaagctcagttgggtttcacgagtgttcctgtgcttatattcagtctgtgcctacatgttctcatgcatgtctaacctgatttacctcttacctgtaacctaccttatcatgtggcttttaattgrcagtcactcngccatttctaagcagatatagtastacctttcagaactcacattggcaagtgtaaaaagatgacttaaggtgaagtgaggacaaaatcacattctgcatactaacctatttttttctccctttaaggtgctaaacttgcacctcatgtccactcagtaacaagtattgggacgtagagcacagcctcactcagctctgaaaggtaatacagcytgtgaggaagtgagccagcagtggcctttgcaattgtggatcttragctctgctctcagcagatttcaggtgtaaccatttgttaactgtactgaaggtgtgtcctcaagaagaaagtgttcaaattaaaaaagctgctgccaagtacactgtgtggtcttctcctttgaatcctagggttctatccctcttcagagtcatgtttctggtgctgctactttaaaacacagctcacaagaataactaacttgctcaaatatggagaaaactcaatagggttccagggaggttctggcagtgtgcagtgtggaaataaancctgagtcctggcngaacac

SEQ ID NO: 146 - DNA, 514 bp, Homo sapiens
  misc feature (500): n equals a,t,g, or c
  misc feature (514): n equals a,t,g, or c
gctcgtgccgcagaggcagggaccactcggggtctggtgtcggcacagccatggcgggcgcgttggtgcggaaagcggcggactatgtccgaagcaaggatttccgggactacctcatgagtacgcacttctggggcccagtagccaactggggtcttcccattgctgccatcaatgatatgaaaaagtctccagagattatcagtgggcggatgacatttggatgactaaaacggcatctgcataacaatggaaaaggaagaacaaggtcttgaagggacagcattgccagctgctgctgagtcacagatttcattataaatagcctccctaaggaaaatacactgaatgctatttttactaaccattctatttttatagaaatagctgagagtttctaaaccaactctctgctgccttacaagtattaaatattttacttcttttcataaagagtagctyaaaatatgcmattaaatttaawaatttctgatgatggnttatctgcagcacn

SEQ ID NO: 147 - DNA, 2535 bp, Homo sapiens
  misc feature (2531): n equals a,t,g, or c
tctgaacaccgtcagcaccctctcttccctatcatgggtcatctgacccctgtccgtctccttgtccctgcttcatgtttgggggcctttctttaactgccttcctggcttagctcagatggcagatgagagtgtagtcaagggcctgggcacaggagggagagctgcagagtgtcctgcctgccttggctggagggacacctctcctgggtgtggagacagcttggttccctttccctagctccctggtgggtgaatgccacctcctgagatcctcacctcttggaattaaaattgttggtcactggggaaagcctgagtttgcaaccagttgtagggtttctgttgtgttttttttttttttttgaaataaaactataatataaattctcctattaaataaaattattttaagttttagtgtcaaaagtgagatgctgagagtaggtgataatgtatattttacagagtgggggttggcaggatggtgacattgaacatgattgctctctgtctcttttttcagcttatgggtatttatcttctattagtatttgtatcttcagttcattccactttaggaaacagagctgccaattgaaacagaagaagaaaaaaaaaaaaagcagcagacaacacactgtagagtcttgcacacacacaagtgcccaggcaaggtgcttggcagaaccgcagagtgggaagagagtaccggcatcgggtttccttgggatcaatttcattaccgtgtacctttcccattgtggtcatgccatttggcagggggagaatgggaggcttggccttctttgtgaggcagtgtgagcagaagctgatgccagcatgtcactggttttgaagggatgagcccagacttgatgttttgggattgtccttattttaacctcaaggtctcgcatggtggggcccctgaccaacctacacaagttccctcccacaagtggacatcagtgtcttctctgtgaggcatctggccattcgcactccctggtgtggtcagcctctctcacacaaggaggaacttgggtgaaggctgagtgtgaggcacctgaagtttccctgcggagtcgataaattagcagaaccacatccccatctgttaggccttggtgaggaggccctgggcaaagaagggtctttcgcaaagcgatgtcagagggcggttttgagctttctataagctatagctttgtttatttcacccgttcacttactgtataatttaaaatcatttatgtagctgagacacttctgtatttcaatcatatcatgaacattttattttgctaaatcttgtgtcatgtgtaggctgtaatatgtgtacattgtgtttaagagaaaaatgaaacccacatgccgccattttcctgaatcaaattctgcagtggaatggagaggaaaatacttctaggcaagcagctagactggtgaattgggggaaatagaaggaactagtaactgagactcctccagcctcctccctattggaatcccaatggctcctggagtaggaaaaaagtttaaactacattcatgttcttgttctgtgtcactcggccctgggtagtctaccatttacttcaccccaagtcctgctgcccatccagttgggaagccatgattttcctaagaatccagggccatgggagatacaattccaagttctcgcttcctcctttgggcatctcttctgcctcccaatcaaggaagctccatgctcaggctctcagctctcgggccagtgctctgctctgtccagggtaggtaatactgggagactcctgtcttttaccctcccctcgttccagacctgcctcatggtggcaacatggttcttgaacaattaaagaaacaaatgactttttggaatagccctgtctagggcaaactgtggcccccaggagacactacccttccatgccccagacctctgtcttgcatgtgacaattgacaatctggactaccccaagatggcacccaagtgtttggcttctggctacctaaggttaacatgtcactagagtatttttatgagagacaaacattataaaaatctgatggcaaaagcaaaacaaaatggaaagtaggggaggtggatgtgacaacaacttccaaattggctctttggaggcgagaggaaggggagaacttggagaatagtttttgctttgggggtagaggcttcttagattctcccagcatccgcctttccctttagccagtctgctgtcctgaaacccagaagtgatggagagaaaccaacaagagatctcgaaccctgtctagaaggaatgtatttgttgctaaatttcgtagcactgtttacagttttcctccatgttatttatgaattttatattccgtgaatgtatattgtcttgtaatgttgcataatgttcactttttatagtgtgtcctttattctaaacagtaaagtggttttatttctatcacamaaaaaaaaaaaaaaaaaaaaaaaaaaaaaaaaaaaaaaaaaaaaaaaaaaaanaaaa

SEQ ID NO: 148 - DNA, 2315 bp, Homo sapiens
  misc feature (125): n equals a,t,g, or c
  misc feature (2279): n equals a,t,g, or c
  misc feature (2297): n equals a,t,g, or c
atagcggccaccctcttccccctttggccagcagaaatgagagtaggtgtttattacctcagtgtgggtgcaggctgttttgtagccagtattcttctccttgctgttgcttcaaaagcagtggnactgtcttttggattcaaagtgggcaaaggccaagaaaggagaggaagctttatttacaaccagggagtctgtggttgactactgcaacaggcttttaaagaagcagttttttcaccgagccctaaaagtaatgaaaatgaaatatgataaagacataaagaaagaaaaagataaaggaaaagctgaaagtggaaaagaagaagataaaaagagcaagaaagaaaatataaaggatgagaagacaaaaaaagaaaaagagaaaaaaaaagatggtgaaaaggaagaatccaaaaaggaggaaactccaggaactcctaaaaagaaggaaactaagaaaaaattcaaacttgagccacatgatgatcaggtttttctggatggaaatgaggtgtatgtatggatctatgacccagttcactttaaaacatttgtcatgggattaattcttgtgattgcagtaatagcggccaccctcttccccctttggccagcagaaatgagagtaggtgtttattacctcagtgtgggtgcaggctgttttgtagccagtattcttctccttgctgttgctcgatgcattctatttctcatcatttggctcataactggaggaaggcaccacttttggttcttgccaaatctgactgctgatgtgggcttcattgactccttcaggcctctgtacacacatgaatacaaaggaccaaaagcagacttaaagaaagatgagaagtctgaaaccaaaaagcaacagaagtccgacagtgaggaaaagtcagacagtgagaaaaaggaagatgaggaggggaaagtaggaccaggaaatcatggaacagaaggctcggggggagaacggcattcagacacggacagtgacaggagggaagatgatcgatcccagcacagtagtggaaatggaaatgattttgaaatgataacaaaagaggaactggaacagcaaacagatggggattgtgaagaggatgaggaagaggaaaatgatggagaaacacctaaatcttcacatgaaaaatcataatctgactaattttgggactgaatgaataagtacaagaggttggattttctatgttggctgattaccatattgaacacatggcatttgtagcattctttaaatctatctactgaaatgtatttgacattcaagcagttatattcggtccttcattttatagaatattggcactattattggtacagtttaaagccattaatatgttttatccatttgataattttacagtaagtaggtctcattcattttgacagttatcaaagatgtactttccacagttaaatttacattaatggcaatttttgatagttttatggctttttactgttagactaatcaaaaataactttaaaaggaacaaagaaactccaacatttcacattatgcatagttatgtagccatttcacagtttctttaagatgtgtaaactcattgtccttgatagtttttatttttcattataaaattataccaggagatttcttttaagattctgagttagcagagttcaaaactattttgtggaaacaagccaactagtaacaatgcagcaacacttctggtttagctaaattatttttccaatgtaggaaatccacactgatttgtacgtctgactgagagaaagatggtcgtctccagcagagaaagtgaacagcatttgttggaaggtgatggctctccctcctccctccccatttcattggcgtaacgtaaagtgtattctgtacataatttacaaataaaacattttattttaattgttacttattatttagatatttctcaacacttaaattcataaaattaagaccatgtaagggtatgtttttagagaaatggaagtttgagtaacccacagaacatctgtgatctttctacagcagcttcagttttgtgccaacattccatgtattttgaatatgagcaaaaactgatcttaagagcagacttaaagtagctttgtacgccttaatgttcattttgatttattttaaatctttacattcagaaatgagatactgtattatcagaccaggaggcattgctgtgaaagataatttcctattctaaaatatcaaatttaaaataaagataatgaaagaaaacagnaaaaaaaaaaaaaggggnggccgccctagggggccc

SEQ ID NO: 149 - DNA, 2604 bp, Homo sapiens
  misc feature (80): n equals a,t,g, or c
  misc feature (2566): n equals a,t,g, or c
  misc feature (2604): n equals a,t,g, or c
tgtgttatgccaaaattgccaaagtgttgtagagtacagtaaaaataataagggatgtgagcaatcaaggatggtatttnctctgtacagccgagattcgggccctccaccctctacagtgagtgaagccgaatttgaagatatcatgaagcgaaacagagcaatttccagcagtcccatttccaaagcagtatctggagccagtgcaggggattacagtgacgcaattgagacgctgctcacagccattgcggttatcaaacagtcccgggttgccaatgatgarcgttgccgtgtcctcatctcctctcttaaggactgtcttcatgggcattgaagccaagtcctacagtgtgggtgccagtgggagctcttcccggraaagacatcgytcccgggaaaggtcacctagccggtcccgggagagcagcaggaggcaccgggatctgcttcataatgaagatcggcatgatgattatttccaagaaaggaaccgggagcatgagagacaccgggatagagaacgggaccggcaccactgagaaaggagtctggttggaagcaaatgtttttttaatggacttgcatctcctcaccttgatcaggactaaaggacggaggccgccccacccccttccctttcctccaaacccctaactccctccagacacccagggaataccctctgccccacaggattgaagactgcttggcagtcctcccaatcccacacctcctgtttgccaggggaaagaacctaaagacttcgtgtgattgggaggggtggcagacaggaagaaaacatgtccaggcccctggtctccatagagaatggtgctttgtccaagaaaacgtatgagtttctgattctccgggagccgttcaatggtgaggttgatgggaagacttccttcccaaagaaaatagatcctccatgcaggatctaggagagtgactgggtgtgccaaaatatgcccagggtcctgccctcagcactagatttaatggggccaagagggtccaaaccccttgctaacataccacttctttgtttaactcctttacctttccagccctttgaggagggaccatgagaacagaaattaccttatgaaaagctacttctgttcctgctttccctctcacgtattgacggtttatttctttgacctcccagagggctgaactctttcaactctgcgctgcccagccttctcagtggacttgcccctcctaagcagagaaggcctatgaggttgcttgctgctgggaagcctggcagagccaattaccaccctctgctgcttagtgcttgggtacctcttgcaataaccagctcttagttgttccctttccctggggcttttccatttaacacatggagcccttcccccagaaggctacttccttgttttagaggaaggtactgcccattgggagatggggacattgggacctcagcaatgaagaacccttgtgaagtaaccaggaggaatggggaaagaagcaagttgggcaggatatggcctacttccataggcttttcttttttcaggtttgatgtaagcatgggcttacatcccccaggtacatacttttacttattgtgggataacctggcactagtaggcaggtaaagtcacaaatttggtgtcttttcaccttttgactgttgacttaatagctcctctcactctgcctggagatacttcctgcctcagatgaggagccagaagaaacagagcccgacttgaatgaactcagctcagagttctaaggaccagcattctgggggccattttctctacaggcaaatggaattgcttttccataacatccaaattgtaatgtggttgctgctgaaggaggaggcagcagcgaggtcctgcggtacccatggggtgatgctacttctgcatgcatctacagggcatctgacacctaacatgagacgtggcatgtgagatgagacttggcatgtgagacatagggtcactagagacccttctgggtcagaggagagagactgaattggactaaacccgtcctctgttcccagcacgtttctcatatagccctcagtcactgagggagtcccccgcagattgggagaggcacattcccttgggacagaggctacaggttggagctttttttcccctgtgcccccaaccccatccccacctccacttcagaacatggcaccccacccaactggccaagtgttaagtgatgtgcttattgagagcaactccgggtgtcttttaaaatgtagagaaaaggtgacagtttaaggaaaaatatatatagaataccagaaatgccgtttacccggagaatttttttctccccatttgttttgtttttactcaatgacaccatttttagttttatttcctgatagcaaaaggaaaaaaaacacccatccctcaaaaaggccaaggtcccgtccccctgttgtcggtgatttgtttgtctttctgataggttgaaaattgtgtaataaacttgatgacgctgtcaatcttttatactgcattgtatttttttccttttgtaacaaatnttttttaataataatggggtgtgagctgttaaaaaaan

SEQ ID NO: 150 - DNA, 685 bp, Homo sapiens
  misc feature (342): n equals a,t,g, or c
  misc feature (641): n equals a,t,g, or c
  misc feature (682): n equals a,t,g, or c
aattcggcacgagcggcaacctgggttccggaagccggagagctggagctttgaagccaccccggtcaaaggatgctgagtccggagcgcctagccctaccggactacgagtatctggctcagcgacatgtcctcacctacatggaggatgcagtgtgccagctgctagaaaacagggaagatattagccaatatggaattgccaggttcttcactgaatattttaacagtgtatgccagggaacacacattctctttcgagaattcagcttcgtccaagccaccccccacaatagggtatcatttttacgggccttctggagatgcttccgaactgtgggncaaaaatggcgatttgctgaccatgaaagaatatcactgtttgctgcaattactgtgtcctgatttcccgctggagctcaytcagaaagcagccaggattgtgctcatggacgatgccatggactgcttgatgtctttttcagatttcctctttgccttccagatccagttttactactcagaattcctggacagtgtggctgccatctatgaggacctgctgtcaggcaagaaccccaacacagtgattggggccgacctcgtccagtgggcagcaccgccacgacctgccttgggcngggcccggcacgcttgaaggcgtggaggcctcgttttctancag

SEQ ID NO: 151 - DNA, 1103 bp, Homo sapiens
  misc feature (1098): n equals a,t,g, or c
agcgcgaggtacggctagagcgtcatttccggctcgaatgcccggcagccgtggcggctagagcgttcctccccagctcgaatgcccggcggccgaggcggctagagcgtcgcctcctcccggggaaccgcgtgtgaccttccagcccgcggaccgatgctgccggcggccgctcgccccctgtgggggccttgccttgggcttcgggccgctgcgttccgccttgccaggcgacaggtgccatgtgtctgtgccgtgcgacatatgaggagcagcggccatcagaggtgtgaggccctcgctggtgcacccctggataacgcccccaaggagtacccccccaagatacagcagctggtccaggacatcgccagcctcactctcttggaaatctcagacctcaacgagctcctgaagaaaacgttgaagatccaggatgtcgggcttgtgccgatgggtggtgtgatgtctggggctgtccctgctgcagcagcccaggaggcggtggaagaagatatccccatagcgaaagaacggacacatttcaccgtccgcctgaccgaggcgaaccgtggacaaagtgaagctgatcaaggaaatcaagaactacatccaaggcatcaacctcgtccaggcaaagaagctggtggagtccctgccccaggaaatcaaagccaatgtcgccaaagctgaggcggagaagatcaaggcggccctggaggcggtgggcggcaccgtggttctggagtagcctccagctcggaggacttgtgttcaggggtcctgggccccgggcgaggtcccgccctcccgtggtcactggctccgcccccagcaccaggcgcccagtggagccgtttgggagaattgcctgcgccacgcagcggggccggacaggccgcacagacctactgtggcgggagggaggggcggctgctgcctggtgacggcacccggaggcccaccaggacgcgccaccggtgaatgtgcctctggtggctgctgagaaaaatacactgtgcagctcagaaaaaaaaaaaaaaaaaaaaaaaaaaagggcggccgctctaaaaggttcctccaagggcccaagtttangctgc

SEQ ID NO: 152 - DNA, 1117 bp, Homo sapiens
  misc feature (1069): n equals a,t,g, or c
ggcccttcccgcctctggggaaggaaacttccgcttcggaccgagggcagtaggctctcggctcctggtcccactgctgctcagcccagtggcctcacaggacaccagcttcccaggaggcgtctgacacagtatgatgatgaagatcccatggggcagcatcccagtactgatgttgctcctgctcctgggcctaatcgatatctcccaggcccagctcagctgcaccgggcccccagccatccctggcatcccgggtatccctgggacacctggccccgatggccaacctgggaccccagggataaaaggagagaaagggcttccagggctggctggagaccatggtgagttcggagagaagggagacccagggattcctgggaatccaggaaaagtcggccccaagggccccatgggcctaaaggtggcccaggggcccctggagccccaggccccaaaggtgaatcgggagactacaaggccacccagaaaatcgccttctctgccacaagaaccatcaacgtccccctgcgccgggaccagaccatccgcttcgaccacgtgatcaccaacatgaacaacaattatgagccccgcagtggcaagttcacctgcaagtscccggtctctactacttcacctaccacgccagctctcgagggaacctgtgcgtgaacctcatgcgtggccgggagcgtgcacagaaggtggtcaccttctgtgactatgcctacaacaccttccaggtcaccaccggtggcatggtcctcaagctggagcagggggagaacgtcttcctgcaggccaccgacaagaactcactactgggcatggagggtgccaacagcatcttttccgggttcctgctctttccagatatggaggcctgacctgtgggctgcttcacatccaccccggctccccctgccagcaacgctcactctacccccaacaccaccccttgcccagccaatgcacacagtagggcttggtgaatgctgctgagtgaatgagtaaataaactcttcaaggccaaaaaaaaaaaaaagcacttaagtattcatcnaacaatcacccagtagcggtgatccagactgaaaagatgcgagacgcc

SEQ ID NO: 153 - DNA, 2038 bp, Homo sapiens
  misc feature (1490): n equals a,t,g, or c
  misc feature (1508): n equals a,t,g, or c
  misc feature (1979): n equals a,t,g, or c
  misc feature (1992): n equals a,t,g, or c
  misc feature (2010): n equals a,t,g, or c
tcgacccacgacgtccggcggcgggaagctggcggcagcggtcggtggcggtggctgagcagaggacccggcgggcggcctcgcgggtcaggacacaatgtttgcacgaggactgaagaggaaatgtgttggccacgaggaagacgtggagggagccctggccggcttgaagacagtgtcctcatacagcctgcagcggcagtcgctcctggacatgtctctggtgaagttgcagctttgccacatgcttgtggagcccaatctgtgccgctcagtcctcattgccaacacggtccggcagatccaagaggagatgacgcaggatgggacgtggcgcacagtggcaccccaggctgcagagcgggcgccgytcgaccgcttggtctccacggagatcctgtgccgtgcagcgtgggggcaagagggggcacatcctgctcctggcttgggggacggccacacacagggtccagtttctgacctttgcccagtcacctcagcacaggcaccaaggcacctgcagagcagcgcctgggagatggatggccctcgagaaaacagaggaagctttcacaagtcacttgatcagatatttgaaacgctggagactaaaaaccccagctgcatggaagagctgttctcagacgtggacagcccctactacgacctggacacagtactgacaggcatgatggggggtgccaggccgggcccctgcgaagggctcgagggcttggctccggccaccccrggccctagctccagctgcaagtccgacctgggcgagctggaccacgtggtggagatcctggtggagacctgagcaggagccctgagtgctcacagccgcctctgacgcattgacacgtgagcactggctcccacggagggtgcgcctgccgccagcggcccagccttgctgccctgtctgctgattctgagaaatcccagaacagcccattaccagtggggctgcagcctaggcccgtcccactcacctcccccctgtggagggccaggcagaggctgttctggaaggcttcttgtcttctgacgtccccacagccctgggcccctcgtgtctctttgtgtcccccactgtagaggacggtgagccgcagctgcatcaacctccttttacctttagataggtgaatttttacaattcagttttacatgttttgggcagtattttgtcttaagatatattttttaaactttttataccttatctctttagattttttcagctattttcttaaaagtatattttttctataaacatcctttgctgctacattagaacttttatagcctaaacaattgcagttggtgtgtttcatttttttaaggtttaaataagggttttttgttttgttttgttttttgcagtgagcatcactacagtctcagtcaacagtgtgaatgtatcatgttttactttaaatgtgtgtgtgatacttcttcattatgtcctgcgctgcagtgangacctgggtgaaaatcanggaaccgcacacagccacatcttcctagacctaagagtaaattatggaggattttatttatgtctatttatatgtaaatgtcattgaagacaaaggtcaaatatttgtctgtttgtagatcacaggcaccagttggtcttcagggacctcatagcccctcggtggtgccttctcaaggcagtgttcctggaggctcccrtcagggtcagcccatgcacctgccctgrrtgaggaagtagcattgctgctggatgagaaacgcctgcgctgctctgttagactggtgctgaaacaaaaggttaaggctaggttgaagtctagaatgaaagaaatctgaatccatgtcattcataaccccttgatctgtagtgtcatgggtgctgccgcagaggaagttgagctgggggtgcctgccagcctttccactcctgccccgcttcaacccaaatgctccctgtttcccaagctttncccaaatttcctnaacctttaaccaaaaagnggggtttcctttggggcaaaaaggccat

SEQ ID NO: 154 - DNA, 645 bp, Homo sapiens
tcgacccacgcgtccggcggccttcatgctgggctcgctgctgcggacgttcaagcaggtcaggcctctacttttatccacaccgctacccctcaccgctgaatctcataacccacgggtcccccacggctctgccacctgtagtgctcgatggttccttcatcagcttcagrccaagttcgaagtcactatgtagactggagaatgtggcgcgatgtgaagagacgaaaaatggcctatgaatacgcagatgagaggctacgtattaattcactcaggaagaataccattttgccaaaaattcttcaggatgtggctgatgaagaaattgctgccctcccccgggatagctgtcctgttagaatcagaaatcggtgtgttatgacgtcccgtccgcgtggtgtgaagcggcgctggaggcttagtcgtatagtcttccgtcacttagctgaccatgggcaactttctgggatccagcgagcgacatggtaaatgagctccagaacctattgagcttgcagggaagccaagcttgcagttccagcaagcaaagattttttttaatagaccaaaccctaatctctacaggggcccagtacagttgtttggcctacctgatgctatctctaaactacttttaaaatg

SEQ ID NO: 155 - DNA, 1596 bp, Homo sapiens
  misc feature (1520): n equals a,t,g, or c
  misc feature (1542): n equals a,t,g, or c
  misc feature (1559): n equals a,t,g, or c
  misc feature (1587): n equals a,t,g, or c
ctggtcttaaatgaccctcttatttttaacttggatacctgctattctgccaaaagacaatttctagagtagttttgaatgggttgatttcccccactcccacaaactctgaagccagtgtctagcttactaaaaaaagagttgtatataatatttaagatgctgagtatttcataggaaagctgaatgctgctgtaaagtgctctttaagtcttttttttttttaatccccttctaatgaatgaaactaggggaatttcaggggacagagatgggatttgttgtatgataaactgtatgtagtttttagtctttctgttttgagaagcagtggttggggcatttttaagatggctggctactcttgttttccctcatgataataaatttgtcataactcagtaacatgaacttgcccctagaggtagttgttaataattttgaaatattaaggtcttgccaagcttctgatgattcacacctgtactactgattattaagcaggacagactgagctttctgttgcaaataccttggaggagaaagtaatttctaaatatacagagaggtaacttgactatatatgttgcatcctgtgcctcccttcatattaatatttgataaagattttaatttatgtaaaacttctaaagcagaatcaaagctcctcttggggaaatggcaagtctttaggataggcaagaccctgtatgaatagtaccaaagcattaccgcatggtagagaacacactcgattaaaaatgttaagctatctgaaaaataaaatgtgcaagtcttcaggatggcacaaaacaaaggttaatgcttcttggggcacatttcttagagggcttgctgagtgtgtaaatataatcgacttttgtttgtgttacatgacttctgtgacttcattgaaaatctgcacaattcagtttcagctctggattacttcagttgacctttgtgaaggtttttatctgtgtagaatgggtgtttgacttgttttagcctattaaatttttattttctttcactctgtattaaaagtaaaacttactaaaagaaaagaggtttgtgttcacattaaatggttttggtttggcttcttttagtcaggctttctgaacattgagatatcctgaacttagagctcttcaatcctaagattttcatgaaaagcctctcacttgaacccaaaccagagtactcttactgcctcttttctaaatgttcaggaaaagcattgccagttcagtcttttcaaaatgagggagaaacatttgcctgccttgtaataacaagactcagtgcttattttttaaactgcattttaaaaattggatagtataataacaataaggagtaagccaccttttataggcaccctgtagttttatagttcttaatctaaacattttatatttccttcttttggaaaaaacctwcatgctayaagccaccatatgcacagactatacagtgagttgagtgggtctcccacagtctttgaggggattacnaagtccgccatatcacccccgngtattggaaggattttngaattgggcgatggggggaaacaaaggncccccccgg

SEQ ID NO: 156 - DNA, 1654 bp, Homo sapiens
atgaagaaactgaggccctgtgatgtgaagtgacttgccccccagccacacagcwggaccattctggctgctgtctggacaagaagtcgtagggggtgagggtggaagctgggaaacccacaggaggcaaccacactagtttagctggcccatggcagtcccactggccgcatcgagggcttcaccaacgtcaaggagctgtatggcaagatcgccgaggccttccgcctgccaactgccgaggtgatgttctgcaccctgaacacccacaaagtgkacatggacaagctcctggggggccagatcgggctggaggacttcatcttcgcccacgtgaaggggcagcgcaaggaggtggaggtgttcaagtcggaggatgcactcgggctcaccatcacggacaacggggctggctacgcyttcatcaagcgcatcaaggagggcagcgtgatcgaccacatccacctcatcagcgtgggcgacatgatcgaggccattaacgggcagagctgctgggctgccggcactacgaggtggcccggctgctcaaggagctgccccgaggccgtaccttcacgctgaagctcacggagcctcgcaaggccttcgacatgatcagccagcgttcagcgggtggccgccctggctctggcccacaactgggcastggccgagggaccctgcggctccgatcccggggccccgccacggtggaggatctgccctctgcctttgaagagaaggccattgagaaggtggatgacctgctggagagttacatgggtatcagggacacggagctggcggccaccatggtggagctgggaaaggacaaaaggaacccggatgagctggccgaggccctggacgaacggctgggtgactttgccttccctgacgagttcgtctttgacgtctggggcgccattggggacgccaaggtcggccgctactaggactgcccccggaccctgcgatgatgacccgggcgcaacctggtgggggcccccagcagggacactgacgtcaggacccgagcctccagcctgagcctagctcagcagcccaaggacgatggtgaggggaggtggggccaggccccctgccccgctccaatcggtaccatcccctccctggttcccagtctggccggggtccccggcccccctgtgccctgttccccacctacctcagctgggtcaggcacagggaggggagggatcagccaaattgggcggccacccccgcctccaccactttccaccatcagctgccaaactggtccctctgtctccctggggccttgggttctgtttgggggtcatgaccttcctagtttcctgacgcagggaatacaggggagagggttgtccttccccccagcaaatgcaataatgccctcacccctcctgagaggagccccctccctgtggagcctgttacctccgcatttgacacgagtctgctgtgaaccccgcaacctcctccccacctcccatctctccttccaggcccatccctggcccagagcaggagggagggagggacgatggcggtgggtttttgtatctgaatttgctgtcttgaacataaagaatctatctgctgttaaaaaaaaaaaaaaaaaaaaaaaaaaaaaaaaaaaaaaaaaaag

SEQ ID NO: 157 - DNA, 1815 bp, Homo sapiens
  misc feature (1808): n equals a,t,g, or c
tcgacccacgcgtccggggcttccggcggcgctcaggtcgcggggcgcctaggcctgggttgtcctttgcatctgcacgtgttcgcagtcgtttccgcgatgctgcctctgctgcgctgcgtgccccgtgtgctgggctcctccgtcgccggcctccgcgctgccgcgcccgcctcgcctttccggcagctcctgcagccggcaccccggctgtgcacccggcccttcgggctgctcagcgtgcgcgcaggttccgagcggcggccgggcctcctgcggcctcgcggaccctgcgcctgtggctgtggctgcggctcgctgcacaccgacggagacaaagcttttgttgatttcctgagtgatgaaattaaggaggaaagaaaaattcagaagcataaaaccctccctaagatgtctggaggttgggagctggaactgaatgggacagaagcgaaattagtgcggaaagttgccggggaaaaaatcacggtcactttcaacattaacaacagcatcccaccaacatttgatggtgaggaggaaccctcgcaagggcagaaggttgaagaacaggagcctgaactgacatcaactcccaatttcgtggttgaagttataaagaatgatgatggcaagaaggcccttgtgttggactgtcattatccagaggatgaggttggacaagaagacgaggctgagagtgacatcttctctatcagggaagttagctttcagtccactggcgagtctgaatggaaggatactaattatacactcaacacagattccttggactgggccttatatgaccacctaatggatttccttgccgaccgaggggtggacaacacttttgcagatgagctggtggagctcagcacagccctggagcaccaggagtacattacttttcttgaagacctcaagagttttgtcaagagccagtagagcagacagatgctgaaagccatagtttcatggcaggctttggccagtgaacaaatcctactctgaagctagacatgtgctttgaaatgattatcatcctaatatcatgggggaaaaaataccaaatttaaattatatgttttgtgttctcatttattatcatttttttctgtacaaatctattatttctagatttttgtataacatgatagacataaaattggtttatctcctccaaggcagtttgtctttttctattcctcccccttcaacctgygtcacaaaagaccaagaacagatgtcggaaaagtttttttttcttcagtattgtttaaaagtttcaatacaaaataagttataaataaaaggcttgtatgtacaaggctcctcagagggaatgagttgtcttcaaccccatagaatgatgtgagtccaagctggctctagaggatcacagcccaagtatcacaggccttgsttgatcagctcctgttgaatttcctccagcacagccatgtctatcagctcctccarctgagccaagtcttctggacaattctccactgactgcaaagcattccactcttcttccatcacctcttgaactagaaagctgttctgagaattccctggcccactgcttccagctggcggtacctgtttaggagcctgtcccggctgtttctcattctctccaggcatctctgccggaaagcctctttccaaggcggcgagcccaccagtttgtacagggagcggcgcggagacctcaacgactccgccatctcctcttcgcgggagacaaagccacaagacccgttccctggaggcgcggcacagacccctgggaggtgtatgcncccgggt

SEQ ID NO: 158 - DNA, 1397 bp, Homo sapiens
  misc feature (1330): n equals a,t,g, or c
  misc feature (1353): n equals a,t,g, or c
cggacgcgtggggccgcggcagtcggcgacgccscagagcggaagagggaagtgaatcaggcgccgggtagtgggttgctgggctgggcttgctgaggtagaggcagcgccaagaagaggcctttgccgctggtcgggattgggatgtcgaagaacacagtgtcgtcggcccgcttccggaaggtggacgtggatgaatatgacgagaacaagttcgtggacgaagaagatgggggcgacggccaggccgggcccgacgagggcgaggtggactcctgcctgcggcaaggaaacatgacagctgccctacaggcagctctgaagaacccccctatcaacaccaagagtcaggcagtgaaggaccgggcaggcagcattgtcttgaaggtgctcatctcttttaaagctaatgatatagaaaaggcagttcaatctctggacaagaatggtgtggatctcctaatgaagtatatttataaaggatttgagagcccgtctgacaatagcagtgctatgttactgcaatggcatgaaaaggcacttgctgctggaggagtagggtccattgttcgtgtcttgactgcaagaaaaactgtgtagtctggcaggaagtggattatctgcctcgggagtgggaattgctggtacaaagaccaaaacaaccaaatgccaccgctgccctgtgggtagcatctgtttctctcagctttgccttcttgctttttcatatctgtaaagaaaaaaattacatatcagttgtcctttaatgaaaattgggataatatagaagaaattgtgttaaaatagaagtgtttcatcctttcaaaaccatttcagtgatgtttataccaatctgtatatagtataatttacattcaagtttaattgtgcaacttttaacccctgttggctggttttttgttctgttttgttttgtattatttttaactaatactgagagatttggtcagaatttgaggccagtttcctagctcattgctagtcaggaaatgatatttataaaaaatatgagagactggcagctattaacattgcaaaactggaccatatttcccttatttaataagcaaaatatgtttttggaataagtggtgggtgaataccactgccaagttatagctttgtttttgcttgcctcctgattatctgtactgtgggtttaagtatgctactttctctcagcatccaataatcatggcccctcaatttatttgtggtcacccagggttcagagcaagaagtcttgctttatacaaatgtatccataaaatatcagagcttgttggggcatgaacatcaaactttggtnccactaatatggctctgtttggnaaaaactggcaaatcagaaagaatgatttgcagaaagaaagaaa

SEQ ID NO: 159 - DNA, 956 bp, Homo sapiens
  misc feature (930): n equals a,t,g, or c
  misc feature (941): n equals a,t,g, or c
  misc feature (945): n equals a,t,g, or c
caaaactggaccatattttgcttattaaataagggaaawmtggaccatatttcccttatttaataagcaaaatatgtttttggaataagtggtgggtgaataccactgccaagttatagctttgtttttgcttgcctcctgattatctgtactgtgggtttaagtatgctactttctctcagcatccaataatcatggcccctcaatttatttgtggtcacccagggttcagagcaagaagtcttgctttatacaaatgtatccataaaatatcagagcttgttgggcatgaacatcaaacttttgttccactaatatggctctgtttggaaaaaactgcaaatcagaaagaatgatttgcagaaagaaagaaaaactatggtgtaatttaaactctgggcagcctctgaatgaaatgctactttctttagaaatataatagctgccttagacattatgaggtatacaactagtatttaagataccatttaatatgccccgtaaatgtcttcagtgttcttcagggtagttgggatctcaaaagatttggttcagatccaaacaaatacacattctgtgttttagctcagtgttttctaaaaaaagaaactgccacacagcaaaaaattgtttactttgttggacaaaccaaatcagttctcaaaaaatgaccggtgcttataaaaagttataaatatcgagtagctctaaaacaaaccacctgaccaagagggaagtgagcttgtgcttagtatttacattggatgccagttttgtaatcactgacttatgtgcaaactggtgcagaaattctataaactctttgctgtttttgatacctgctttttgtttcattttgttttgttttgtaaaaatgataaaacttcagaaaataaaatgtcagtgttgaataaaaaaaaaaaaaaaaanattactgcggnccgncaagggaattc

SEQ ID NO: 160 - DNA, 2265 bp, Homo sapiens
gcccacgcgtccgcctggctgctatcagagaagaagggtgtttggggtgtgttttacaaagccgctgtgattggaaccaggctgcatgctgctgtggcaattgcttgtgttgtaatggccttttacgtcctgtttataaaatgaattccaaagcacccaagtcatcaactgccaaccaaggggacggggatgaagaacctgttggagacctgaacccagtgtaggagagttcagctgaaatcatcggtccccaggatgacaccacagcatctgcccctgctatatgtggggaaaactcatggtcacgaacattatttatgcttcagggggactacagaaagccagcttcctttggattctatgtgtaaatcagtcctkggcagagtgcatataatgtccggataaattacacccctcggtgataagattacatacctccttcataaaaacctgtcatcctgttttgttcttcagctcctcatcaggatcttttcaaactgaggctcattagggaaggaactaggctgtgttcagacttcttttgaagagagagaattttcaagacttcttttcactctttgatttggatctggcaaattggggaggggatgctgggtgggaaacagttatgaaatgccaagaaattctttggctttagaaatttatctttcatgtacccatccgggaacataaaagagaggcatagtgctcattgcaaaaagagaacagatgaagtagctgtgttatgtgctggtatcttgagagttttgccaagaaaatctgggcctacataaaatttgagaattatctgtgtgatgagaccagaaagcagtggcttagacaagaaaaaatctttctgttcaccagtatcctcaaatggagacttcacttgatcagatggtatatgaaaaatgaatcaactattgctatttcgtaaaacctttttatattttctaaatttacttagtgctaaatactgttactcagttttaaatgccacgactaggggaaaaagaaactattgaagaaataattgtttagtatatttgcagttggggtagaagaaagaaatctagtatattgattcatatactagtaaattcatctagtataagaacttgtgatgttagattgaagttttgtcatcttataaaagacaacaaacttattttctgtttaagtctgagtgttatggcaatttttagttgattacttatttttcttagccaaattttaattttcttcatattgcattgctctttagttgtctctggaaattctatttactttaaggacatgagaaattcaaatgagagaagttgctgatattcatcagtgtgtttggacagttcatagggtccacaaatcaaatgaggttgtttcctgaagtagaagaaaacagaactttgcaattgatactgaagtactttgccatggagttagtaactcctgagcagaccattttagatggctcagcatttggcaggaagacttctccattccctgcttatatctatggaaggatcagctgttggatgtctagaacttctctatttaaaaaaaaagagtaggtctaaaattaaattattataagcaagcatagacatgggtcttccagttgaattgtccattaccgtaaaacttaatggtggacaagttagctgtggttgattcctgtgtggcagtaaattgtcttctgtctgcttactccaaataataaaagctgctaggaagtttagattttgaaataggcagtttaatgctttgagggtttctagaaatacagaaagtcatcaagtaaacactgcatgtctaatcatctcagagttgtggctgttatctcttcaggaattggtccacagggtaaatttcaacaattcatacgttttccattgtcatttctgaggacctttgagatgagagaaaggaaatctagtggaacaggaaagagagttacaccttgtgggtgtgagtttgggacctgttggcagaagggaatgtcactccctggaaacaggttcagcatgtttgcacttgttattttgtagctttaatgatttttgttttctaatagggcaaatgtctctaagcttggtgtttagagctgcttcatattttaaactagttccattccacagttctagttcaaaccagtttttacagcctcctgggtgggtcgtcttgacccaaactcttgtgttgttacattttgagaggttttcataccagaatgtacctcggccgcgaccacgctaagccgaattt

SEQ ID NO: 161 - DNA, 998 bp, Homo sapiens
ggtgggcggggcttcgcgtctccttctacggatatctgtggaccttatggaagcaaagactcttggaactgtaacgcccagaaaacctgtcttatctgtcagtgcaagaaaaattaaggacaatgcggctgattggcacaatttaatcctgaagtgggaaaccctcaatgatgcaggttttaccactgcaaataatattgccaacttgaaaatcagtttattgaataaagacaagatagaactagacagcagcagcccagcctcgaaggaaaatgaagaaaaggtgtgtctggaatataacgaggaactggagaagctgtgtgaggaactgcaggccaccttggatgggttgaccaaaatacaggtgaaaatggaaaagctgtcttcaactaccaagggaatttgtgaactagaaaactaccattatggggaggagagtaaacgaccccctctgttccacacgtggcctacaacccatttctatgaggtttcgcataagctcttggagatgtacaggaaggagctgctcctgaagcgcacggtggccaaggagcttgcccacaccggggatcccgacctcaccctgagctacctgtccatgtggctgcaccagccctatgtggagagcgacagyaggctgcatctggagagcatgctgctggagacaggccaccgagctctctgacgtcctgagacggctgcggacactggctccttccacgtctcaccaggcagacagtctgcctaggacccagtgccgcaggcctggatcagaccccaggatcagaccttcttggggtcttctggccagagcttgtcaccagccccatggcctctccaggcgtgctcatgcccacaacccgcggccagccccacgtggtgccgctcagccttctctgcccctcctgggaatctgtcattcgtgggtgcttcagagtaaaatcaatgagtttctgagcagaaaaaaaaaaaaaaaaaaacttcggggggggccccgt

SEQ ID NO: 162 - DNA, 1750 bp, Homo sapiens
  misc feature (704): n equals a,t,g, or c
  misc feature (1724): n equals a,t,g, or c
ggcagagctggatttgatcctggttcatttattttcccccaagaatactccataggtgatgctatacactttctcttacatcatttcaggaggaacatgatgtctgattgttccactttcagtgattttaatattgatcaatgagttctggtggtaccaactactacaaagtttctcatcaatctttcacctgatggttttagcagctattgataattgttgcctggatccattatttcatttcaggggttgtaaaatagtgattttctggttctatcaaaccwcttgcatttatcawctatgrttcttctttaaggaactttctctaaatctgaatgggaaagatgcgataaatatttatcaaattttagagtgagttagtgccctagcaacctccaaagttgacaaatgagtatttctttaaagcaaggtatggcccaaccaatactttgaaactagcatgtttagaatagagcaggaggaaactatatttgaaaggtcagaagtggaaagactaagagggcctgaacaataagaggacagaaccaagaggagttggcaactaattggatgtggggrttaaggraaggtaagcatcaaagattacctccaagtttgttagaaggttagtagcaggrttcygatgccatycaagtaaatacaggtctcagtcagatgaaccccaagagccacatgtatttgangggtactttgtctcacacttttacctgttacatggttttmagtaatttagaatttaagccagtagtggggcgactgtacatctatcgacatggtgaggtagagcatgtttgggaggaaagacgttgaatcccatttggtgacagtgagcttgaggtgctgccagaacactgcactgaagataggaggagactgtaggaaatacaagataggaaaggtctccactgaaatgttaactctttctctctaaacrgccatccaggcctcaatgtctgcagtttctgatctgtgattatgacttatccaaatcttacatttcttaaaaatagtcatagatgaagggaatcacagttgatrgttatatggtgacattagtggcttaaattctraatrrctggaaactgtataataggcaaaactgtgaggcaaataaaatgcttctcaaatctgtgtggctcttatggggttaatttgatttggacctgtattaatttcttatggctgctataactaacaaattaccacaaacttggtggtttaaaacaacacacatttattctctttctgttctggaggccagaagtctaaaatgagattcactgggctgcagttcactgggcaaggccatgctcctctggaggcttccatgatgcatcccatattcagtgtttcccgagtaagccccacccatgcaggtctgcagttttacctcaacaggcttttgcactcagtggctctctcctgtggtttctatctgaaattctcttcattttttttttaataactgctttattgagatataattcacatgccayacaattcacctatacagtatacaattcagtagtgtttactatattcaragttgtgcaactatcatttttctcacccccaaaaraaaccctatgcccgttagtattcactctgttttctcacaactctaggtaaccactaatctactcyccatctctatarattkgcccatgctaramatttcawataaatggaaycatacatgtggnctttttcactgagtaaattttcaagg

SEQ ID NO: 163 - DNA, 3096 bp, Homo sapiens
  misc feature (51): n equals a,t,g, or c
  misc feature (3071): n equals a,t,g, or c
  misc feature (3072): n equals a,t,g, or c
  misc feature (3078): n equals a,t,g, or c
  misc feature (3085): n equals a,t,g, or c
  misc feature (3096): n equals a,t,g, or c
gtcggtcccacccttttctgcagcattcagctaaatgacgggcggagccgncggcggcttccggtcgggggaaaaaagttgggccgaagaggggccgggaagacgcaagaggaagaagagaaaacggccgggcggcggtggctgtaggttgtgcggctgcagcggctcttccctgggcggacgatggacagccagggcaggaaggtggtggtgtgcgacaacggcaccgggtttgtgaagtgtggatatgcaggctctaactttccagaacacatcttcccagctttggttggaagacctattatcagatcaaccaccaaagtgggaaacattgaaatcaaggatcttatggttggtgatgaggcaagtgaattacgatcaatgttagaagttaactaccctatggaaaatggcatagtacgaaattgggatgacatgaaacacctgtgggactacacatttggaccagagaaacttaatatagataccagaaattgtaaaatcttactcacagaacctcctatgaacccaaccaaaaacagagagaagattgtagaggtaatgtttgaaacttaccagttttccggtgtatatgtagccatccaggcagttctgactttgtacgctcaaggtttattgactggtgtagtggtagactctggagatggtgtgactcacatttgcccagtatatgaaggcttttctctccctcatcttaccaggagactggatattgctgggagggatataactagatatcttatcaagctacttctgttgcgaggatacgccttcaaccactctgctgattttgaaacggttcgcatgattaaagaaaaactgtgttacgtgggatataatattgagcaagagcagaaactggccttagaaaccacagtattagttgaatcttatacactcccagatggacgtatcatcaaagttgggggagagagatttgaagcaccagaagctttatttcagcctcacttgatcaatgttgaaggagttggtgttgctgaattgctttttaacacaattcaggcagctgacattgataccagatctgaattctacaaacacattgtgctttctggagggtctactatgtatcctggcctgccatcacggttggaacgagaacttaaacagctttacttagaacgagttttgaagggtgatgtggaaaaactttctaaatttaagatccgcattgaagacccaccccgcagaaagcacatggtattcctgggtggtgcagttctagcggatatcatgaaagacaaagacaacttttggatgacccgacaagagtaccaagaaaagggtgtccgtgtgctagagaaacttggtgtgactgttcgataaactccaaagcttgttcccatcatacccgtaatgctttcttttttcctttattgccaatctttgaactcattcaactccaggacatggaagaggcctctctctgccctttgactggaaaggtcaagttttattctggtgtcttggggaagctttgttaaatttttgttaatgtgggtaaatctgagtttaattcaactgcttccctayatagactagagggctaaggattctgtctgctgctttgtttcttctaagtaggcatttagatcattcctgtaggcttcctattttcactttactgctctaatgctgctagtcrtagtctttagcacactaggtggtatgcctttattagcataaaacaaaaaaaactttaacaggagcttttacatattactgggatggggggtggttcgggatgggtgggcagctgctgaaccctttagggcatttcctctgtaatgtggcgctttcaactgtactgctgcagctttaagtaccttaaagcttctcctgtgaacttcttagggaaatgttaggttcagaactaaagtgttttgggtgggttttgttgcgggggggagggtaacaatgggtggtcttctgatttttatttttgaggttttgtcaactggagtacgtagaggaactttatttacagtactttgatttggcaggttttcttctacttgtgctctgcctggagctgtttccatatgatataaaaagcaagtgtagtattccattactatgtggcttagggatttatttgttttttaaaatcaaccatgttagctgggattagactccctacagtccttcaatggaaaagtaacatttaaaaatcctttgggtaattcaaattacagatttaaaagagcttaagatctggtgttttgttaatgcttctgtttattccagaagcattaaggtaacccattgccaagtatcattcttgcaaattattcttttatataactgaccagtgcttaataaaacaagcaggtacttacaaataattactggcagtaggttataattggtggtttaaaaataacattggaatacaggacttgttgccaattgggtaattttcattagttgttttgtttgttttgatttgaaacctggaaatacagtaaaatttgactgtttaaaatgttggccaaaaaaatcaagatttaatttttttatttgtactgaaaaactaatcataactgttaattctcagccatctttgaagcttgaaagaagagtctttggtattttgtaaacgttagcagactttcctgccagtgtcagaaaatcctatttatgaatcctgtcggtattccttggtatctgaaaaaaataccaaatagtaccatacatgagttatttctaagtttgaaaaataaaaagaaattgcatcacactaattacaaaatacaagttctggaaaaaatatttttcttcattttaaaacttttttttaactaataatggctttgaaagaagaggcttaatttgggggtggtaactaaaatcaaaagaaatgattgacttgagggtctctgtttggtaagaatacatcattagcttaaataagcagcagaaggttagttttaattatgtagcttctgktaatattaagtgttttttgkctgtttacctcaatttgaacagataagtttgcctgcatgctggacatgcccttaaaaccnntgaatnagccccnactagatcttn

SEQ ID NO: 164 - DNA, 1216 bp, Homo sapiens
  misc feature (203): n equals a,t,g, or c
  misc feature (1200): n equals a,t,g, or c
  misc feature (1211): n equals a,t,g, or c
ggcacagcggaaggtcagcgtgtgaagtaggcgctggcaacgcggggttacccgctgttattgaggagtaacggcccagcggaccacccaggcttgaggcagcggcgggaaccactcggtttgctgcgataccatggaaggaggcgggggaagcggcaacaaaaccacagggggattggccggctttttcggagccggcggancaggttactcgcacgcggatttggctggcgtcccgctaactggtatgaaccctctgtctccttatttaaatgtggatccacgatacctcgtgcaggatacagatgagtttattttacctaccggagctaataaaacccggggcagatttgagctggccttctttacgattggaggatgttgcatgacaggggctgcgtttggtgcaatgaatggtcttcggctaggattgaaggaaacccagaacatggcctggtccaaaccaagaaatgtacagattttgaatatggtgactaggcaaggggcactttgggctaatactctaggttctctggctttgctctatagtgcatttggtgtcatcattgagaaaacacgaggtgcagaagatgaccttaacacagtagcagctggaaccatgacaggcatgttgtataaatgtacaggtggtcttcgagggatagcacgaggtggtctgacaggactaacacttaccagcctctatgcactatataataactgggagcacatgaaaggctccttgctccaacagtcactctgaagattttgccaactcatgaatggaggacacttcagtagtcatctagatccttttataagacagtttggagttattctctctcttctacctacaattagtttgaaaaattggagattttgatttgctgtgatgaaaatcctggatggctgaccaagactggcacttgttccagccattagtgagttgaagccaaagccctttggtgactcactgagtaccatggttctgttctcctctggagatcttgcacgtatctgttttcctcccccatgaactagaaaaccacttactcccagaattcaggtcgtgcttgttagtactatatcaccaagtccattcatttaatgatccaaaactgtaatgttgcactgtattccaaataaagggtaaaaacagaaccaaaaaaaaaaaaaaaaaaaaaagggggggccccccanggggtccaagntttgg

SEQ ID NO: 165 - DNA, 780 bp, Homo sapiens
  misc feature (696): n equals a,t,g, or c
  misc feature (726): n equals a,t,g, or c
  misc feature (739): n equals a,t,g, or c
  misc feature (759): n equals a,t,g, or c
  misc feature (773): n equals a,t,g, or c
gcaaaatgctggaattacaggtgtgagctaccatgcccatttatttatttatttatttatttatttatttttgagactccgtttcaaaaaaaaaacaaaaaaaacaaaaccaaaaaataaaaaaacacatcagcttgacattttggaggcattcccagactcagggttagtcagcagattagcatttaaaagaaagtcttgtccctacagattccctgacctcagctacccatgaagggtgggaagaggagtccttagcaagaagtccaggaagttgacaacctcctcaracctgataggacactcctctctccaccctgcctcctgactgatttaatctcaggggtgtgaggacctctgagataggccccaggagtctcacccgcaccacttatgtctcagggctaaccagagactccctgaaacagatcctagaggattcccaagtgataggataaatagagaggtactgagacttcctggcgtgggtgacctctcccaggctggccaacctcccccattcagaatttgctgagcaccaggagtgaatgaagtaaaggaagcccctaggagttcaagaagcagagatttccaggtccatgcaccaaagytcatgtgstcaattytcaggaaaggcytcactcmgttaaaaaattttgtatcwtgaaagggtaaatgaattaattagtgaatctnggttctaagcccatggcttactagaaatantatagtaaatcanaaaaaaaaaaaaaaacttgngggggggcccgggncccaatt

SEQ ID NO: 166 - DNA, 3380 bp, Homo sapiens
  misc feature (9): n equals a,t,g, or c
  misc feature (14): n equals a,t,g, or c
  misc feature (17): n equals a,t,g, or c
  misc feature (23): n equals a,t,g, or c
  misc feature (3373): n equals a,t,g, or c
  misc feature (3379): n equals a,t,g, or c
cggccaaancggcntanagtacngacgtcacgtagtaggggaaagcstggtacgccgtgcaaggtaccgggtccgggaattcccggggtcgacccacgcgtccgcgccattaccgccggagccgccgagagccttagccgacggaaactggacactggaccggcagcgccatgagactcctcccccgcttgctgctgcttctcttactcgtgttccctgccactgtcttgttccgaggcggccccagaggctygttagcagtggcacaagatcttacagaggatgaagaaacagtagaagattccataattgaggatgaagatgatgaagccgaggtagaagaagatgaacccacagatttggtagaagataaagaggaagaagatgtgtctggtgaacctgaagcttcaccgagtgcagatacaactatactgtttgtaaaaggagaagattttccagcaaataacattgtgaagttcctggtaggctttaccaacaagggtacagaagattttattgttgaatccttagatgcctcattccgttatcctcaggactaccagttttatatccagaatttcacagctcttcctctgaacactgtagtgccaccccagagacaggcaacttttgagtactctttcattcctgcagagcccatgggcggacgaccatttggtttggtcatcaatctgaactacaaagatttgaacggcaatgtattccaagatgcagtcttcaatcaaacagttacagttattgaaagagaggatgggttagatggagaaacaatctttatgtatatgttccttgctggtcttgggcttctggttattgttggccttcatcaactcctagaatctagaaagcgtaagagacccatacagaaagtagaaatgggtacatcaagtcagaatgatgttgacatgagttggattcctcaggaaacattgaatcaaatcaataaagcttcaccaagaaggttgcccaggaaacgggcacagaagagatcagtgggatctgatgagtaaatgttcctttgtgcaacaattcggtctttacttaacctgccctaatatttttcggcctgatgggaattagtgcagagaagccatgtcaccatagaaggcaactcctacttgtgtgtggactgagcaatcagagtctgtggcgataatattgctgaaaatgcactgcattcatttttctaaagtaacaaatttggtttttttttaaaccattaaaatctatgtgtgtgcgtgtgtatgtatgtgagcagttggtcttaccagaatcattgttgaactacctgaaacaagtctttagaatactaaatataatgctgwtgtctcttcctttttgacattttctgattttttcccccaaaactcagttaatatttacccactatgattattgatgtcctgccttgaacagttttaaagaaaacaatttttggaatagctcaaatttcaattgatggcacaaatcagcattttgttgttgttactgtattacaattagtattctaaaggcagaagcagaagtagctgctttttagcaatagaattgtttcagtattttgctgctgtttaatgcgcatcttcagaaaacttcccagtggcttcaaggaatttggggatctctctggcaacaaattgtgaaacatgaaatttctgctgactttaatatatgaaacctaatcctacccccttttttaacaaaaagaaactagtacatttgtgaaaattgtgttgtgttgtccattgttgctctagttctgacccagaggtagctctggagtgattttagacctactcactcagttgtgtgtaggtttttttgttttgttttgagagagaatttttctctccttaatagaagcatcctttttaaagagaagttgccttggtccacacactaagcagaaaaccaagttatcaggacagagatatttcccarttactcctaatcaatgaagaaagtgagttggatatttttaaagcagttaactaattttttcttacctaatcttttgggagttttgcttgttgatataacctttttagttaacctgaaagattccaaaaattgttcttaagtgcttgagactggaaccaaaattaaattgtacttcataaaatcctcttatagagttactcttgccctagattgtaaattaagtttggcattattgtcagactggatggagggtgaagtaaaatagtatgaacaattaagaggctctccccctcttgtctttaagccatattctcctacatgtattttataagaaaatgttaagtcaaattttagtggctctttaattcctgacctcttcattctccttttcagtataacctcccctatgctcatgcccacacagacaaaaaaacaaaacgaaatacacacagaaaaaagtctttccaaactgtttaagtatttaaacatctgagccaaagcagatagaagttattgtataattgttaatcactttgcaaataggggctatcarattacctatattggcattgctggattataaactctatatctgtaatataaagtgtttgagtttttaatkgggctgttatgatcagtagttgattttgagaaagctctatgagctctaagtaactgcatggttttttgtttaatgtaatataggagacccttcacattcccaaggaatatattccaaaacatttttgtgaatatctaagtttgtgaaactactagggcatgatacagtaaggtgtaattacagaatttacgaaatgtaaatggcctctacagagttttatggaatacctggtactaacgtaggcagytgcaaaaccacactgagttacagctgtcagccctcctcattcctaaataacttgccttacatatcagccctcccacttctgaagttcaaattagtgcctcggaaatgtagaatttattatttgtcatttttttttttttagcatagattgagaacagttgaactcttaaatcctcagatgccaggggtctgctctagcatcagtaagtatttagcagaaactaactccgtaatgaatggaattcaattccacacatggtttgttcaagcacacttaataagtagcctattttttaaatgtctttttaaaatgtaaatatttggatgaagtttttctttgttttgatatattcatttgctacaccaactatgttttcagaattcatcttttgaacaacttggtttcagaatatgtaaaatgactttaaggatcttgtgtatcaaacctatccccggatgtgtgagaataatgtgttcataaagcatggatctcgcaaaaaaaaaaaaaaaaaaaactcggggggggcccggtccccaattcgncctatng

SEQ ID NO: 167 - DNA, 1645 bp, Homo sapiens
  misc feature (7): n equals a,t,g, or c
  misc feature (1319): n equals a,t,g, or c
  misc feature (1640): n equals a,t,g, or c
gtcgacncacgcgtccgtgtgaagatggcgctctccagggtgtgctgggctcggtcggctgtgtggggctcggcagtcacccctggacattttgtcacccggagctgcaacttggtcgctctggcctggcttggggggcccctcggtcttcaaagcttcacctttctccaaaggcagatgtgaagaacttgatgtcttatgtggtaaccaagacaaaagcgattaatgggaaataccatcgtttcttgggtcgtcatttcccccgcttctatrtcctgtacacaatcttcatgaaagaaagccttgagccgggccatgcttctcacatcttacctgcctcctcccttgttgagacatcgtttgaagactcatacaactgtgattcaccaactggacaaggctttggcaaagctggggattggccagctgactgctcaggaagtaaaatcggcttgttatctccgtggcctgaattctacgcatattggtgaagataggtgtcgaacttggctgggagaatggctgcagatttcctgcagctgaaagaagctgagctgtctctcttgctgcacaacgtggtcctgctctccaccaactaccttgggacaaggcgctgaatgaaccatggagcggatggcattgtcctgcagtcgtatagtatagcagtgcaggaacaaacagcacttgccagcaaagtctgtgtgtactgttaagtgtgtgggaggcagagagaggagcaggggccatgggcttcacagcatggcacacmtgtgggaactgcagacattcctctcacagctagaactgaaacaaaccctcttgctaggggtggtccgtgtgaggtgtcatcctgtccccctcataattactaatagctggaactggcagcagcctctactgggcttttactgtgatgtgttcagttcatgtcctaggaagtcagcttttgccccaggtgggaatccttatttggcttaggactgatccacttccatgttacttacatctgtgggtttttgttgttgctgttagaaaatttgtggctggtgaaaacagcactcctttggctggagcacttgtgtccrtgcatgtacttgggtgtttccctccatcctttctgatatgaccaaaaatcaagttgttttgttttttgtcaccttcactggcatgggctaaccacttctttttcaaaccctctgaacacctttttctgatgggtaacttgcaggaatattctattggaaaagataacaggaagtacaagtgcttcttgaccccttcctcaatgtttctagccttcactctccattgtcttttcntggctgtattacagccctctgtggatcttcaactctgctgcctccactgtgatgcagcagtccaactgtaactgacagtggctgccttctctgggccatggatcacacctgtaaggtactaattactgcccagcctggggagatcaggagaggtctgcatagttagtaagttgggtttagcttttgtgtgtgcatcagtgacttagagttctgtaataacttattgtaaatgcatgaagcactgtttttaaacccaagtaaagactgcttgaaacctgttgatggaaatgaaaaaaaaaaaaaaaaaaacccgaggggggncccgg

SEQ ID NO: 168 - DNA, 1148 bp, Homo sapiens
  misc feature (1076): n equals a,t,g, or c
gacgcgggctccctctgcacacagtgcacgaagacgctgtcgggagagcccaggattcaacacgggccttgagaaatgtggctcttgtacctcctggtgccggccctgttctgcagggcaggaggctccattcccatccctcagaagttatttggggaggtgacttcccctctgttccccaagccttaccccaacaactttgaaacaaccactgtgatcacagtccccacgggatacagggtgaagctcgtcttccagcagtttgacctggagccttctgaaggctgcttctatgattatgtcaagatctctgctgataagaaaagcctggggaggttctgtgggcaactgggttctccactgggcaaccccccgggaaagaaggaatttatgtcccaagggaacaagatgctgctgaccttccacacagacttctccaacgaggagaatgggaccatcatgttctacaagggcttcctggcctactaccaagctgtggaccttgatgaatgtgcttcccggagcaaatcaggggaggaggatccccagccccagtgccagcacctgtgtcacaactacgttggaggctacttctgttcctgccgtccaggctatgagcttcaggaagacaggcattcctgccaggctgagtgcagcagcgagctgtacacggaggcatcaggctacatctccagcctggagtaccctcggtcctacccccctgacctgcgctgcaactacagcatccgggtggagcggggcctcaccctgcacctcaagttcctggagccttttgatattgatgaccaccagcaagtacactgcccctatgaccagctacagatctatgccaacgggaagaacattggcgagttctgtgggaagcaaaggccccccgacctcgacaccagcagcaatgctgtggatctgctgttcttcacagatgagtcgggggacagccggggctggaagctgcgctacaccaccgagratcatcaagtgcccccagcccaagaccctagacggagttcaccatcatccagaacctgcagccttcagttacccagtttccgtgnactgatttgcatttgctttacctggcaaggcaaggcttacccagttccttagggggggggaacccaggttgg

SEQ ID NO: 169 - DNA, 2063 bp, Homo sapiens
  misc feature (39): n equals a,t,g, or c
  misc feature (1219): n equals a,t,g, or c
agttcctggagccttttgatattgatgaccaccagcaantacactgcccctatgaccagctacaggtacagccgtcctaccctgaaagacccttcctccccttctgtctgcacttggctcctcttgtcccaacttcctcctggatcccctggccagctggggcaggaacggccaacatcacccatgggctgggtaagttcccacacaactagaattgggtcatggggatcccttttcaccttcccctgaaaacacacataaggcaggatttcatcaccaccaccaccaccctggccaccaggctactacccagttggccctgtgtaaaaacgtccaagctgaaaaaaaaaaaccctcctcccctactagatctatgccaacgggaagaacattggcgagttctgtgggaagcaaaggcyccccgacctcgacaccagcagcaatgctgtggatctgctgttcttcacagatgagtcgggggacagccggggctggaagctgcgctacaccaccgagatcatcaagtgcccccagcccaagaccctagacgagttcaccatcatccagaacctgcagcctcagtaccagttccgtgactacttcattgctacctgcaagcaaggctaccagctcatagaggggaaccaggtgctgcattccttcacagctgtctgccaggatgatggcacgtggcatcgtgccatgcccagatgcaagatcaaggactgtgggcagccccgaaacctgcctaatggtgacttccgttacaccaccacaatgggagtgaacacctacaaggcccgtatccagtactactgccatgagccatattacaagatgcagaccagagctggcagcagggagtctgagcaaggggtgtacacctgcacagcacagggcatttggaagaatgaacagaagggagagaagattcctcggtgcttgccagtgtgtgggaagcccgtgaaccccgtggaacagaggcagcgcatcatcggagggcaaaaagccaagatgggcaacttcccctggcaggtgttcaccaacatccacgggcgcgggggcggggccctgctgggcgaccgctggatcctcacagctgcccacaccctgtatcccaaggaacacgaagcgcaaagcaacgcctctttggatgtgttcctgggccacacaaatgtggaagagctcatgaagctaggaaatcaccccatccgcaggntcagcgtccacccggactaccgtcaggatgagtcctacaattttgagggggacatcgccctgctggagctggaaaatagtgtcaccctgggtcccaacctcctccccatctgcctccctgacaacgataccttctacgacctgggcttgatgggctatgtcagtggcttcggggtcatggaggagaagattgctcatgacctcaggtttgtccgtctgcccgtagctaatccacaggcctgtgagaactggctccggggaaagaataggatggatgtgttctctcaaaacatgttctgtgctggacacccatctctaaagcaggacgcctgccagggggatagtgggggcgtttttgcagtaagggacccgaacactgatcgctgggtggccacgggcatcgtgtcctggggcatcgggtgcagcaggggctatggcttctacaccaaagtgctcaactacgtggactggatcaagaaagagatggaggaggaggactgagcccagaattcactaggttcgaatccagagagcagtgtggaaaaaaaaaaacaaaaaacaactgaccagttgttgataaccactaagagtctctattaaaattactgatgcagaaagaccgtgtgtgaaattctctttcctgtagtcccattgatgtactttacctgaaacaacccaaagggcccctttctttcttctgaggattgcagaggatatagttatcaatctctagttgtcactttcctcttccactttgataccattgggtcattgaatataactttttccaaataaagttttatgagaaatgccagtgtgcaaaawraaaaaaaaaaaaaaaaaaa

SEQ ID NO: 170 - DNA, 2916 bp, Homo sapiens
atgatccaaagtacaggaaatgggcctgggaagccgtagaggccttggaaaaccattgcagagtgaatggaggctattcaggcctaagggatgtttaccttcttcatgagagttatgatgatgtgcagcagagtttcttcctggcagagacattgaaatatttgtacctaatattttctgacracgatsttcttccactggagcattggatcttcaatagcgaggcacatcttctccctatcctccctaaagataaaaaggaagttgaaatcagagaggaataaaaagacattttatattttattctgctccattcccttcactgtataccttaataattccttttctggtratcaggcacatgatgaactttgattagtaggtctgtgattaagttcttaaattgttttgcagtcttttatgtttattatcataggtataggtggacctaaattccttatcatatcctttattaattcagccagtgtatccaccagttttttgtttatgtttttaagtaacctattatctctggatttcatgaaggtgtaatatcgtttttgttaaactgaatagaattgtatagcgatgacytcttaattataatttgatttgactgcaaaactttttcctcctctaagaggagatgatgtctgctttaagctgtaatgttttgccatgttgcaaaaagccataataataagtataaaaaagctttttcctttacaatttcatgttaatctggtttgtctgtccaccagagacagatcttctgtgacagcctccttatgcaggtctatcattatttgatagaatgtcttctaaaatacttcactcacattgtaattcaaattagaaagtcattccaaaaggatcatgtcatgttgacctcatttcatcggaactgcagtatatttttgttggttaattatattagtgttttctattttgtaaatgtgtcctttaattttactttaaatgccctgtgtcatttctggattatatactagttaatttcttccattccctactacacagagaggtgagctttcaaattttgcagagctctgctatcactgaattacatttatctgaagaaaatagtacaacttaatggattagcttttgggtttaactgaatatatgaagaaattgggtctgtctaaagagagggtatttcatatggcttttagttcacttgtttgtatttcatcttgatttttttctttggaaaataaagcattctatttggttcagatttctcagatttgaaaaaggctctatctcagatgtagtaaattatttcctttcagtttgtgaaagcaggatttgactctgaaagaagctttgccaattttacttattcgtgatcaatcaaggaaaatctaataaattttaggccaaataagaatatagcatatttagtatggttatagtcaacacagagatcacaacttagaagaaatataaagaaatggccactccccatcccccacagtcctggagtaaatcaaaatcaatatatgattcttttaaacattaagtttgaaataggaatggttttctcaagaatagatttggtgtgataccttgtgtttgcttacattggcccactatatatacatatatatttatgtagatatacttccatgaaagggctaatacgatgcatatactgaagggcaaggactttgaccatgtgaattttcagccgagaatggtcagaaagatcagtacaaccccatggattaggctgaaacatatgaaattgctgcatttgtagtttaaaaactgtcagcagtttcatatggttccacctaatattattgaagacaattattttcttagctatcaataggcttaatagttttagttattttagcttttgaaagtgttttaaaagatttcctttatcggacaggaccatctttatgacctgctttctgtttttcaatatcatacattggtgtatgtcaaagaataaattagtaaaattagtaaatgaaaaagactcttccgtacatcattatttccatgctaatgtgtgtctgtgatccagaataacttctcccactcatatcttcagttcacctaatgaaatgaatggatagcaagagccctttgttcccaggactttaaggcaaaatattaaaaattattgccaaaattaagaatataatgtttgtataaatgtccttgaatttgccatttaaattaactcattttcttttcactttgatttgaaagctgataagtatttctgcagcagatagaatattaaaatcaggttgtgtgtacacactgcactatgaggtaccttggtgtcctggtgtgaatagacaagaagctgtactatatgttgctctctcagtggcaacaatgaagtttttgcaattctagaacttggatttttttttaacaaaagtcccaaaacaccaaaaatgtaaacaagataagagattaatattgtagtgatgtaatttaattaaagttatattttgggttaattttaacaactgaagtcttattgttgaaacttattttcaacaaaactgtgcagttaaatttgtatacgtattcacatactgaaagatgaaccgttaaaatagcacttaattttgtgtttcttcaatatgtcttgatatactttgtgcaattaatattacacatgtaagttgtatggcagtttacagaactcaatgacttgtcatgaggttttcatatgagctacacattgtgtacattgattgttttttatttttacataaatccattctgtcattttcaactttatatataaatctccaatgttatgggaaacaatagattgacacataatttttaaaaattatatttgtaaaatttctctattgtgaataaagtcttttaatataaaaaaaaaaaaaaaaaactcga

SEQ ID NO: 171 - DNA, 2529 bp, Homo sapiens
atggcgcattttcttgcaccaactaatgcggtgtcgctggcggctgaggagggcggagagttctgtggtgaaatagtgggaaggattcatgtaggcatcgggaagagcctaagtccacattataaaataggaagttgatgcggggtacagttactcccggaccggcggcgtgaaagtcgtgatatcatcgttgaactattagctttgaagtttaaatccaatggagaagactcaagaaacagtccaaagaattcttctagaaccctataaatacttacttcagttaccaggtaaacaagtgagaaccaaactttcacaggcatttaatcattggctgaaagttccagaggacaagctacagattattattgaagtgacagaaatgttgcataatgccagtttactcatcgatgatattgaagacaactcaaaactccgacgtggctttccagtggcccacagcatctatggaatcccatctgtcatcaattctgccaattacgtgtatttccttggcttggagaaagtcttaacccttgatcacccagatgcagtgaagctttttacccgccagcttttggaactccatcagggacaaggcctagatatttactggagggataattacacttgtcccactgaagaagaatataaagctatggtgctgcagaaaacaggtggactgtttggattagcagtaggtctcatgcagttgttctctgattacaaagaagatttaaaaccgctacttaatacacttgggctctttttccaaattagggatgattatgctaatctacactccaaagaatatagtgaaaacaaaagtttktgtgaagatctgacagagggaaagttctcatttcctactattcatgctatttggtcaaggyctgaaagcacccaggtgcagaatatcttgcgccagagaacagaaaacatagatataaaaaaatactgtgtacattatcttgaggatgtaggttcttttgaatacactcgtaatacccttaaagagcttgaagctaaagcctataaacagattgatgcacgtggtgggaaccctgagctagtagccttagtaaaacacttaagtaagatgttcaaagaagaaaatgaataatgttaagccattcttgattggacctcatagcttattttagttaatcttttttttgtcttttagccttaccaccttttaaaaaatttgttattctccagaaacagtaaataggtgagtaggggtggtgcaagtgaattcgttttcatttagaagcccctctgtacagataatcaaaattcaaagttgaaagaatcaaaagcagccacagttatgtaggtctgatttgaatgtcataattgcagtgacaggacattgccaccaactctatcctactaccatcaatgttgtgtttattccgtcaataaaaaagacttgcttccaggaatttttatccatacactttctaactgtactatctgggcagttccaagccagtttctattagctagctggaccaaagaccacaaatctctttttttcctaaacgctgctgtaaggaatatctcacttttccccccggaaacaccctcactgaagtcttctatgaaaaggctgataatgggctgggcgcggtggctcacgcctgtaatcccagcactttgggaggccgaggcgggcagatcacgaggtcaggagatcgagaccatcctgacacggtgaaaccctgtctctactaaaaatacaaaaaattagctgggcgtggtggtgggcgcctgtagtcccagctactcgggaggctgaggcaggagaatggtgtgaacccaggaggcggagcttgcagtgagccgagatagtgcctctgcactccagcctgggtgacagagcgagactccgtctccacaaaaagggctgataatgataaacagtgagcactccggtcctttttcttaggttttccttttttccttcctctccaccccacmagttttgctttttaaccaaggtgtctctgcttgatgaaawtcacatgctagtctaaatctttttttctcccttgtaacawttatgtkccccmmmctggttagtatatgggkacagcattccctttccaattgggaagcggaaaaagagagtatgggatattttagaagggagcctttgaaccttattatatttccccatccattgatagtgacaatcttaaaagggttgttttcttaccttaagtacaaaagcatggaaaaatgcgcttttccttcccgcccacatcaccaccccgacttgaagacagtaggtgcttgaatggaaagtgagtaggcatctttaatcgccctgattaaaggaaagtgttagcctgagagggcctgactgaaaagtaaccaaaggcttaatatcaaacactaattagctttttagtgccttaaccctgacctggttaccagttttctgtagtttctacacccaagccactgaagtcatctgtggcccaagaggtaggacaaaaaaaaaaaaaaaaaaaaactcga

SEQ ID NO: 172 - DNA, 811 bp, Homo sapiens
  misc feature (205): n equals a,t,g, or c
  misc feature (805): n equals a,t,g, or c
cggcggcttctcgcgcactgatgacctggaagtgatgcctaaagctgtggaccgcgtgggctcgcctccctgggactaggtttcagcggccgctgcgatgaccaaaataaaggcagatcccgacgggcccgaggctcaggcggaggcgtgttccggggagcgcacctaccaggagctgctggtcaaccagaaccccatcgcgcanccctggcttctcgccgcctcacgcggaagctctacaaatgcatcaagaaagcggtgaagcagaagcagattcggcgcggggtgaaagaggttcagaaatttgtcaacaaaggagaaaaagggatcatggttttggcaggagacacactgcccattgaggtatactgccatctcccagtcatgtgtgaggaccgaaatttgccctatgtctatatcccctctaagacggacctgggtgcagccgcagctcccaagcgccccacctgtgtgataatggtcaagccccatgaggagtaccaggaggcttacgatgagtgcctggaggaggtgcagtccctgcccctacccctatgaggggctccggtagcacctgggcacctgccgctggaagctattgggctggcagcaggacgactggctgtcctcctgcccacccacactgacggcatcttcccagttccccaaggcacgccttcttcccaggcagctctaacagccctttcatgaaggtaatgctagtcttctgtccatcagtgccatttcctgtagaactaaaggctgttccaagaatgtggggtggggaaagtaaatgctaagactnaaatgt

SEQ ID NO: 173 - DNA, 2221 bp, Homo sapiens
ggtttaatatccctctccaccaaattaatcaggtttacagacagggtcccaccggtattcacattcttgttagtgatcagatggttcagaattttcaagatgagagttgttttttattctccacagtaaaagctgaaagtagtgatggcatccacataattttgaagtgatgtcttatatagactgaactgtattcagtaccaaatagtcacgcttaaaagtgtgtgaagactgaatccaagaagtcttgggattggattttaccatatgaaatgtttcatattgaaaacacaagatgacctttctaatgagctgtatgagaggtgaatctcctcactgtcactgccatagccaagcatcctcatgagagtgagcacatcggcacagcatgcatccagctctggaggccacggtgcaggcatagctgcctgmtgctctggcagaggccagtaaatacagttcctagaagcagcctttgctgtctttttacactgtatgcggtttggaaatgaatgtagaaacttactgtgggcatttacctttctgtgccagtttggcttttattgcctgaaccttatgctgacctggagaggagatgggggacagtgctgttgtggggccagcagtgaatctgtatgcggagagttgtgttgtgctgatgtggccgttggtggtcaggtaagaggctcggcaccttcttggaagaaatcatgtctgagggtgtacgtttgatatgatcatgccagattggagaagatccaagccaggaagatgggcttgaagcaaactgcattatcaggagtaccttggtgagaggatcagtgtaaatcctaataggtacaaagacttttgtgttttggctttgtcacagatttattgaaaaacttttttgcttctgcttccatttttagcattttagtttctggttttcatttttggagattccttgccttttaaactcgtggtttttctctcattttcttccctctctccctccatctctgaccacccccaccctaaccccccacccccaccatcctattaaacatttttaaagccctaccccagacattggaaataggtgacccaagtagggggagaaagtattattgttgatagcttctgactaggtgttaagggatcttcattatgaacaagatgaatttttttctggaaacactagatgttatcaatcaaacactaaaatgtaccatacaaatcccttaagcctctcaaatattgagctttagtacaatcatggatagacattctggtgatgatttaggggctttttatacaccacatactagcttctttctctataagagtgcctctttcataaaaccaaatgcttgtctgctagcatacttttcaaagggaatccactgttttctcactttcctcccatatctccgtccttcatccaaaaccttcccagaatccatcagcaagcatgtttgaggcctgtggtgtaggggactgaattttttttttaacttctattccattttaattgtaggatatctttgtccatatacccaggtgtcctgatttgaatgtactatttgatcctcattgtgttcaggcaaaaaataggaaatgagtaattttgagtttgaaatctctcccagaagacaaactacttcagtgagtaaaagctttgacattttatgttttattcataaagggggttaattatttgctacaaagaagcacgatctattttcatcatcgatttgaaaatatctgtaactcctatagatcctataggcagagagttttcctttctgactttttccctttgctttcgtgtgaccacatgttttctgtaccagtcactggggaaagaagtgagtttatctcgtttgttttaaaagttttgcttgtctatttagcattcctttttgggtctcaagatttatggaacaataaatgtcatttaatgctgtgtgcttattttgaattcctcatcaggttttagaagcggggtaaaaatacttagatgcttatcagacttgaaattatactgagtggcattgaacgtgagtttgtcccagtgaaacaggctaaataaattttggcaccagcaaatttgttactttgtttttttaatagtaggatgtacacatttcagtataataaatgttttctgattgttttgcaaaaaaaaaaaaaaaaaactcgagggggggcccgtacccaatcgcctaacatgcatcgt

SEQ ID NO: 174 - DNA, 757 bp, Homo sapiens
ggggtacggctgcgagaagacgacagaagggtgtggtcgacgggtcctccaagagtttggggcgcggaccggagtaccttgcgtgcagttatgtcggcgtcggtagtgtctgtcatttcgcggttcttagaagagtacttgagctccactccgcagcgtctgaagttgctggacgcgtacctgctgtatatactgctgaccggggcgctgcagttcggttactgtctcctcgtggggaccttccccttcaactcttttctctcgggcttcatctcttgtgtggggagtttcatcctagcggtttgcctgagaatacagatcaacccacagaacaaagcggatttccaaggcatctccccagagcgagcctttgctgattttctctttgccagcaccatcctgcaccttgttgtcatgaactttgttggctgaatcattctcatttacttaattgaggagtaggagactaaaagaatgttcactctttgaatttcctggataagagttctggagatggcagcttattggacacatggattttcttcagatttgcacttactgctagctctgctttttatgcaggagaaaagcccagagttcactgtgtgtcagaacaactttctaacaaacatttattaatccagcctctgcctttcattaaatgtaaccttttgccttccaaattaaagaactccatgccactcctcaaaaaaaaaaaaaaaaaaaaaaaaaaaaaaaaaaaaaaaggggggggggg

SEQ ID NO: 175 - DNA, 2221 bp, Homo sapiens
  misc feature (2194): n equals a,t,g, or c
  misc feature (2210): n equals a,t,g, or c
  misc feature (2211): n equals a,t,g, or c
cgcggaagggcagaatgggactccaagcctgcctcctagggctctttgccctcatcctctctggcaaatgcagttacagcccggagcccgaccagcggaggacgctgcccccaggctgggtgtccctgggccgtgcggaccctgaggaagagctgagtctcacctttgccctgagacagcagaatgtggaaagactctcggagctggtgcaggctgtgtcggatcccagctctcctcaatacggaaaatacctgaccctagagaatgtggctgatctggtgaggccatccccactgaccctccacacggtgcaaaaatggctcttggcagccggagcccagaagtgccattctgtgatcacacaggactttctgacttgctggctgagcatccgacaagcagagctgctgctccctggggctgagtttcatcactatgtgggaggacctacggaaacccatgttgtaaggtccccacatccctaccagcttccacaggccttggccccccatgtggactttgtggggggactgcaccgttttcccccaacatcatccctgargcaacgtcctgagccgcaggtgacagggactgtaggcctgcatctgggggtaacccctctgtgatccgtaagcratacaacttgacctcacaagacgtgggctctggcaccagcaataacagccaagcctgtgcccagttcctggagcagtatttccatgactcagacctggctcagttcatgcgcctcttcggtggcaactttgcacatcaggcatcagtagcccgtgtggttggacaacagggccggggccgggccgggattgaggccagtytagatgtgcagtacctgatgagtgctggtgccaacatmtccacctgggtmtacagtagccctggccggcatgagggacaggagcccttcctgcagtggctcatgctgctcagtaatgagtcagccctgccacatgtgcatactgtgagctatggagatgatgaggactccctcagcagcgcctacatccagcgggtcaacactgagctcatgaaggctgccgctcggggtctcaccctgctcttcgcctcaggtgacagtggggccgggtgttggtctgtctctggaagacaccagttccgccctaccttccctgcctccagcccctatgtcaccacagtgggaggcacatccttccaggaacctttcctcatcacaaatgaaattgttgactatatcagtggtggtggcttcagcaatgtgttcccacggccttcataccaggaggaagctgtaacgaagttcctgagctctagcccccacctgccaccatccagttacttcaatgccagtggccgtgcctacccagatgtggctgcactttctgatggctactgggtggtcagcaacagagtgcccattccatgggtgtccggaacctcggcctctactccagtgtttggggggatcctatccttgatcaatgagcacaggatccttagtggccgcccccctcttggctttctcaacccaaggctctaccagcagcatggggcaggactctttgatgtaacccgtggctgccatgagtcctgtctggatgaagaggtagagggccagggtttctgctctggtcctggctgggatcctgtaacaggctggggaacacccaacttcccagctttgctgaagactctactcaacccctgaccctttcctatcaggagagatggcttgtcccctgccctgaagctggcagttcagtcccttattctgccctgttggaagccctgctgaaccctcaactattgactgctgcagacagcttatctccctaaccctgaaatgctgtgagcttgacttgactcccaaccctaccatgctccatcatactcaggtctccctactcctgccttagattcctcaataagatgctgtaactagcattttttgaatgcctctccctccgcatctcatctttctcttttcaatcaggcttttccaaagggttgtatacagactctgtgcactatttcacttgatattcattccccaattcactgcaaggagacctctactgtcaccgtttactctttcctaccctggacatccagaaacaatggcctccagtgcatacttctmaatctttggctttatggcctttccatcatagktgcccactccctctcttacttagcntccagggtctttaacnnctctggacta

SEQ ID NO: 176 - DNA, 1513 bp, Homo sapiens
  misc feature (773): n equals a,t,g, or c
  misc feature (791): n equals a,t,g, or c
  misc feature (965): n equals a,t,g, or c
  misc feature (1461): n equals a,t,g, or c
gcggcgcggcagggctgcgcggccgggtggcgcgggaggaagtcacgtgggagcgcgggctcacatgactggccgcgcgatggacccgctgcccgcggctgcagtcggggcggcagctgaggcggaggctgacgaggaggcggatcccccggcgtcagatctgccgacaccccaggccatcgagccccaggccatcgtgcagcaggtcccagcccccagtcgaatgcagatgccgcagggaacccgctgctgctgtcccacaccctgcaggagctgctggccagggacaccgtgcaggtggagctcattccggagaagaagggcctcttcctgaagcatgtggagtatgaggtttccagccagcgcttcaagtcctcggtatacagacggtacaatgacttcgtggtcttccaggagatgctcctgcacaagttcccctaccgtatggtgcctgccctgccacccaagagaatgctgggagctgacagggagttcatcgaggccaggaggagagccctgaagcgcttcgtcaacctggtggcgcgacaccccctgttctccgaggatgtggtcctcaagctcttcctgtccttcagcggctcggatgtgcagaacaagttaaaggagtcagcacagtgcgtcggggacgaattcctgaactgtaagctggctaccagggccaaggacttcctcccagctgacatccaggctcagtttgccatcagccgggagctgatccggaacatctacaatagctttcacaagcttcgcrncagggccgagcggatcgntcgsggccatcgacaatgcggcagatcttctcatattcgggaaggagctaagtgcaatagggtctgacacgaccccgctgccctcctgggcgctctgaatagcagcacgtgggggtccctgaagcaggctctgaaaggcctgtctgtggaattcgcgctgctcgccgacaaggntgcacaacagggtaagcaggaagagaacgacgtggtggagaagctgaacctcttcttggatctgctgcagtcctataaggacctgtgcgagcggcatgagaagggcgtgttgcacaagcaccagcgggccctgcacaagtacagcctgatgaagaggcagatgatgagmgccaccgcgcagaaccgcgagccggagtccgtggagcagctggagtcccgcatcgtggagcaggagaacgcgattcagacgatggagctgcggaactacttctccctgtactgcctgcaccaggagacgcagctcatccacgtctacctgcccctcacctcccacatcctccgcgccttcgtcaactctcagatccaagggcacaaggagatgagcaaggtgtggaacgacctgaggcccaagctcagctgcctctttgcgggaccacacagcaccctgaccccaccgtgctccccgccggaggacggcctgtgtcctcactaagcnctgaggctgaggtggtgctccctgcggycgcactaaaacctctttccaaaaa

SEQ ID NO: 177 - DNA, 4083 bp, Homo sapiens
  misc feature (13): n equals a,t,g, or c
  misc feature (48): n equals a,t,g, or c
  misc feature (157): n equals a,t,g, or c
gcgaccgcgtsgnagaggaggtggcagcggccgggagcratrycaasnccagcgacccaccatggagacccgctacaacctgaagagtccggctgttaaacgtttaatgaaagaagcggcagaattgaaagatccaacagatcattaccatgcgcanctttagaggataacctttttgaatggcacttcacggttagagggcccccagactccgattttgatggaggagtttatcacgggcggatagtactgccaccagagtatcccatgaaaccaccaagcattattctcctaacggctaatggtcgatttgaagtgggcaagaaaatctgtttgagcatctcaggccatcatcctgaaacttggcagccttcgtggagtataaggacagcattattagccatcattgggtttatgccaacaaaaggagagggagccataggttctctagattacactcctgaggaaagaagagcacttgccaaaaaatcacaagatttctgttgtgaaggatgtggctctgccatgaaggatgtcctgttgcctttaaaatctggaagcgattcaagccaagctgaccaagaagccaaagaactggctaggcaaataagctttaaggcagaagtcaattcatctggaaagactatctctgagtcagacttaaaccactctttttcactaactgatttacaagatgatatacctacaacattccagggtgctacggccagtacatcgtacggastccagaattcctcagcagcatcctttcatcaacctacccaacctgtagctaagaatacctccatgagccctcgacagcgccgggcccagcagcagagtcagagaaggttgtctacttcaccagatgtaatccagggccaccagccaagagacaaccacactgatcatggtgggtcagctgtactgattgtcatcctgactttggcattggcagctcttatattccgacgaatatatctggcaaacgaatacatatttgactttgagttataatatggttttgtgacttatgagctgtgactcaactgcttcattaaacattctgcattgggtataatctaagaattgtttacaaaaagattattttgtatttacccttcattcctttttttgatccttgtaagtttagtataaatatatctagacattcagactgtgtctagcagttacgtcctgcttaaagggactagaagtcaaagttccttgtctcactatttgatctgctttgcagggaaataacttgttttttctcatgtttcatcttctttttatgtaaatttgtaatactttcctatattgccctttgaaatttttggataaaagatgatgttttaagttccaatgagtattactagttactcaataccacttattgagtactctgtttctacgtatgtagaatgtatagggatagaagagttgaaaagggaaagcaaaactcctcaagtagcttccttaaaatgtcattcataggagatgtactggaattgctcattctgtgactttatttgtgtcctaaacattcttcagtgaaaataattttatttcagtcaaacatttatgaggaaatgagatcacatctttgtcactggatgctacttgaagagggagtactttgtaaccactttgatatgctgttatcaccaccccctgccctctgctgccataatcacacaaatttaaaaagaaagaaaacagtcttccatagatttttaaggaagaaagggcccaagccaggagatcgcttggttttcttccagaagttaaatggggggatctgaagatttgaatgtttggtctgctttgaaatgtatgtcttttgggatgtattatatgcctagctttataatcagtataaattttaattattccaggaatatgcataatattgaaatatttcatgtcctattttaatagaaaacctcagggcccaagtaacagtgatagaagttagaaaaacctttacttagaattgtccacctagtcagagcccaagaaagaattttcagtggaaaaatcaatatataacttagtgctagctagcgccacagactctagtagataatattatcatcataatggctggtgaaaccatataatcacagaaaaacattgccttcagcatgttcagttcgcagcactgagggcactcttgagggtgttgttaatgaagatttaatttttaaatacaggtggttccaagctttcaaataggttatgctccaaaagtgttatttgtaagttaatttttttacaagtcaaacaatgttggaagtggtatttaggttctagatcggtccacgaaagttagcccatatgtatatcttgaatagtataggggagggtattcataaagtccttatgtggttttaactaagtgaaattatggacaagagaaataattgtaaaatcgtcttaaaggcaaatttaatttttactcctgtttatgggacattcgttctattaactgtcagacacaatttctgttttcatctgagagccagttttcctttatttctacatctaaaataagaacatattgtacactattatataatacagaattgtcttaaactttaataaattcgcattttaaaggtgtttacagattattttttatatctgtagctgaatttgttaaagtctaaaaagctcaaggactttatgaagatctcattatatgaggaaaatcataggttaccattttataactctattgccataagaaaatacactctaaaatcttgatttgaaacatattagaaaccttgattcagtgctcagtggtctcctagtaagaagtcaccgacggtagcgtcatatgagaagaaagaaatccccaccacctcaacctctgctgagattgtgtgctaggaacagccttccctccgtttcccctcagtcaaacttgagccagcctctggatcgatgtgatcttattgcatgtttccatggggtgtacctatactttaagccaatcctgctgcattcactgctaagttaaataaaaagccaagaagattttgcactgtgcagatcctttgctatctgacttgcatctyttcccccacctgtcagctagccacctgcttgtttgtgttgggatattttttagcacctgaagcaccatctgaaaggggcaccattttcttcttccctttgatcycacatatgctccctaaaaatccttaagttgtcaatctgatccccagtgtgaggttaatgagcaaaattggtctttggggccctttttgtccaagccccactgaaaggcctcttcagaaaactattatctttaaagccctactttaactccttaattccagcatacagctaaaactggatgtatattctggcaagtaaaggctgaggactcctctttaatcctcagatctagataactcatgacattttatttgaccaacatagcacatgatgagatatcaaggtaattaaaatagcatgcttgaaaaaaaatacgtaatctgtttcacctgtaactgtttaagccaataaacttttcaaaatttatgtaatgtggggcttttatgtagcactttacgttttcatgctgcttattgttttattctactgaaaaaaatgaatttcaagattctcaacttttttaatttcaaaaattgtttattgttttgactataggaatacaaaatttcctattttgggagaataagaactctttttgtcatttttggctatgaataaactttctggtcttttgagaccacccatttttatagatcagaatcagaaaacaggtaaacctcactcacacatttggactcatttgaacaaaaatctaggccaaaatactgaaaagcctatgtgtttttttaattggaagtatatgtaaggttaatgcatttagtgaacgtgactaacaaagactaatgtgcacattaacagatgtactttttaaggttttatgggaggctgtgcattgctcaaaagctgttgggaacgccttctgaacagttgccttcagaactagtttgagctgctcaataaaaccagtgactttactcaaaaaaaaaagaaaaa

SEQ ID NO: 178 - DNA, 2732 bp, Homo sapiens
  misc feature (1653): n equals a,t,g, or c
  misc feature (2664): n equals a,t,g, or c
  misc feature (2699): n equals a,t,g, or c
gatccgcgggactcccggtctggcttgggcaggctgcmcgggccgtggcaggaagccggaagcagccgcggccccagctcgggagacatggcgggcgttaaagctctcgtggcattatccttcagtggggctattggactgacttttcttatgctgggatgtgccttagaggattatggcgtttactggcccttattcgtcctgattttccacgccatctcccccatcccccatttcattgccaaaagagtcacctatgactcagatgcaaccagtagtgcctgtcgggaactggcatatttcttcactactggaattgttgtttctgcctttggatttcctgttattcttgctcgtgtggctgtgatcaaatggggagcctgcggccttgtgttggcaggcaatgcagtcattttccttacaattcaagggtttttccttatatttggaagaggagatgattttagctgggagcagtggtagcactttattctgattacagtgcattgaatttcttagaactcatactatctgtatacatgtgcacatgcggcattttactatgaaatttaatatgctgggttttttaatacctttatatatcatgttcactttaagaaagacttcataagtaggagatgagttttattctcagcaaatagacctgtcaaatttagattatgttactcaaattatgttacttgtttggctgttcatgtagtcacggtgctctcagaaaatatattaacgcagtcttgtaggcagctgccaccttatgcagtgcatcgaaaccttttgcttggggatgtgcttggagaggcagataacgctraagcaggcctctcatgacccaggaaggccggggtggatccctctttgtgttgtagtccatgctattaaaagtgtggcccacagaccaagagcctcaacatttcctagagccttattagaaatgcagaatctgaagccccactctggacccaggacattttgatgagatccaaaggagttgtatgcacatgaaagtttgagaagcatcatcatagagaagtaaacatcacacccaacttccttatctttccagtggctaaaccacttaacctctctgggtgttacctgctcatttgtttaaaaaaaaaaaaaaagtctcacctgctttcatgctgaggacaagttcagatgttcaagcctataatatttaggcagttcctcaaatttatgaaaagtgttctcagaattgggagacagtcaaagggtacaaagcctcagttaggaggaataagtgtgatttttttttaaagatcacttgcacagcatgctaaatataggaataattgaatgtatatttcaatattgctaagagagtaaatttctaatgttctcataaaaaagttaaatatttgagatcatatgttaattagtgtaatcattccaccttatattcaaaaatcataaaaccgtattgtaccctataaaaatatacaataatttgtcaatatataatcaaaataaaaaacaaaacatactctctcccccaaaaaaacatctcagtggggaacagatgtatcttttcatctgaaagacaatgctgggggaagagctccactgagatgcgggcagggaggctgggctcgagccagcccctgcgttagnaggagggggagaacagataggtaactcttttacatttcctttatgatctggcacttctccccagctccttccctctgccccccacccctactcctcaacagttctggtttgccctgacttctctacggctctggcttcttcccgaagagatataggagccatgtaagcacgcagtgggtgaactgcttaatttcactacatgttgatgtacttgtcttccgtcytgtaggtcttttctatataactttatgccacccttaaatgaatcattgggtatacctgtcatgttggatcctgtaatcacagttttccctgctcacctttttgtctaagatctattgagaaagggaaatatgggaaggagaaccatttgatcagaatacaaccaatagtctttaagcattgttaaagtatgaaactgaaatacattcaaaacacttaatccttgaggcttgtgatctgagtaattagcaggtatgatgctgggactggaaaatagaaagtaataactaaagggttaatgtgcaacgttattttttggccttgttcatgattttatgttttcagtgtcctgtgtacatatagaattgttaaagttgtcatttccaatatttatattagaaaaattatttagatactttataattttaaccggcatttttaataatgacacttgcatttattgtattgtaataaatttcacttttaactttaaaaagtttaactttaaaatttttttgtgatgttgccttgcctgaaaagataacaaaaatgagagaatttcttgatgttttaaaatgggcagttttgagcaataatctgtcctaacagaacagtagcaataagttttaggataccatcttgaatgtctagttggtgtgcaatagcttttctttctaagatggcaataatgattcatttctactacattttgcaaaagtgtttttgttgcttatacacattttcaataaccaaggtagccttcatatgtagccttaaagcattacctcntgattgtatctttagattgatataaagtacttgcntatagagtatttgaagtgatagattattagatt

SEQ ID NO: 179 - DNA, 872 bp, Homo sapiens
ccccatgttgtttagtggagacaaggaccatagatttgaatatagccatggtcctattgcagtcctggcaaacagcagtgacccttccacggggccagagagtactcatcctttgccagcaaagatgcacaactataactatggtggtaacttacaggaaaatccgagtggccccagcctcatgcatggacagacctggacttctcctgcccaaggacctggatattcacaaggatacaggggacatattagcacatcaactggcagaggcagaggcagagggttaccatactgagtatctgtttttcctcaggcacatcatttttatctggaaagacttttctagctgcaatttaaggcagcaatccaagagacttgaataataataattcaacaacagctttatttttatgtggagaagggtcttgcatacaatagtttaaaaaagacaaaaaaaacctttgcttaaattcatgctgttctaaaaactagatcgattgtacatcttcacaaattctagttaacaattttattttgtattcttgcagttttaagtggatgctaattttaggggcataagccttttatggccctcttgcagatcttctgaactatgcacatttgtgctttttttgtaagtttggaccaacttttatgtaacaaacagcccctccccacctccagttttacaacaatcagaaagggcactgatttatttggtatttttctttttacaaagctacctttagtcaaaggtcactgtgcagtctttgcacctgctttcagtgttattgtgaaaggtgtactttgtgctcatttcagaaaataaaacacaacctttctcttgatgcaaaaaaaagaaaaaaaaatct

SEQ ID NO: 180 - DNA, 2251 bp, Homo sapiens
gcacagaatgctcagggtcactgaaccactgcttctcttttgaaagtagagctagctgccactttcacgtggcctccgcagtgtctccacctacacccctgtgctcccctgccacactgatggctcaagacaaggctggcaaaccctcccagaaacatctctggcccagaaagcctctctctccctccctctctcatgaggcacagccaagccaagcgctcatgttgagccagtgggccagccacagagcaaaagagggtttattttcagtcccctctctctgggtcagaaccagagggcatgctgaatgccccctgcttacttggtgagggtgccccgcctgagtcagtgctctcagctggcagtgcaatgcttgtagaagtaggaggaaacagttctcactgggaagaagcaagggcaagaacccaagtgcctcacctcgaaaggaggccctgttccctggagtcagggtgaactgcaaagctttggctgagacctgggatttgagataccacaaaccctgctgaacacagtgtctgttcagcaaactaaccagcattccctacagcctagggcagacaatagtatagaagtctggaaaaaaacaaaaacagaatttgagaaccttggaccactcctgtccctgtagctcagtcatcaaagcagaagtctggctttgctctattaagattggaaatgtacactaccaaacactcagtccactgttgagccccagtgctggaagggaggaaggcctttcttctgtgttaattgcgtagaggctacaggggttagcctggactaaaggcatccttgtcttttgagctattcacctcagtagaaaaggatctaagggaagatcactgtagtttagttctgttgacctgtgcacctaccccttggaaatgtctgctggtatttctaattccacaggtcatcagatgcctgcttgataatatataaacaataaaaacaactttcacttcttcctattgtaatcgtgtgccatggatctgatctgtaccatgaccctacataaggctggatggcacctcaggctgagggccccaatgtatgtgtggctgtgggtgtgggtgggagtgtgtctgctgagtaaggaacacgattttcaagattctaaagctcaattcaagtgacacattaatgataaactcagatctgatcaagagtccggatttctaacagtccttgctttggggggtgtgctgacaacttagctcaggtgccttacatcttttctaatcacagtgttgcatatgagcctgccctcactccctctgcagaatccctttgcacctgagaccctactgaagtggctggtagaaaaaggggcctgagtggaggattatcagtatcacgatttgcaggattcccttctgggcttcattctggaaacttttgttagggctgcttttcttaagtgcccacatttgatggagggtggaaataatttgaatgtatttgatttataagttttttttttttttttgggttaaaagatggttgtagcatttaaaatggaaaattttctccttggtttgctagtatcttgggtgtattctctgtaagtgtagctcaaataggtcatcatgaaaggttaaaaaagcgaggtggccatgttatgctggtggttaaggccaggsctctccaaccactgtgccactgacttgctgtgtgaccctgggcaagtcacttaactataaggtgcctcagttttccttctgttaaaatggggataataatactgacctacctcaaagggcagttttgaggcatgactaatgctttttagaaagcattttgggatccttcagcacaggaattctcaagacctgagtattttttataataggaatgtccaccatgaacttgatacgtccgtgtgtcccagatgctgtcattagtctatatggttctccaagaaactgaatgaatccattggagaagcggtggataactagccagacaaaatttgagaatacataaacaacgcattgccacggaaacatacagaggatgccttttctgtgattgggtgggattttttccctttttatgtgggatatagtagttacttgtgacaagaataattttggaataatttctattaatatcaactctgaagctaattgtactaatctgagattgtgtttgttcataataaaagtgaagtgaatctgaaaaaaaaaaaaaaaaaaaaaaaaaaaaaaaatctttaaatctgtgccga

SEQ ID NO: 181 - DNA, 2789 bp, Homo sapiens
  misc feature (2579): n equals a,t,g, or c
gtgtgtgtgagtgtgcgcgctccgagtgtgtgtgtatttgtgtatcggcggtcccgcagtcccggatgttgcggacagtatgaggcaagcgcagggggacggggaccagcagctgtcgccgccgctctcagggtgaagagggaacagaaatctttgccccctgactttggaaatctcgtttaaccttcaaactggcgatgtcaagggttccaagtcctccacctccggcagaaatgtcgagtggccccgtagctgagagttggtgctacacacagatcaaggtagtgaaattctcctacatgtggaccatcaataactttagcttttgccgggaggaaatgggtgaagtcattaaaagttctacattttcatcaggagcaaatgataaactgaaatggtgtttgcgagtaaaccccaaagggttagatgaagaaagcaaagattacctgtcactttacctgttactggtcagctgtccaaagagtgaagttcgggcaaaattcaaattctccatcctgaatgccaagggagaagaaaccaaagctatggagagtcaacgggcatataggtttgtgcaaggcaaagactggggattcaagaaattcatccgtagagattttcttttggatgaggccaacgggcttctccctgatgacaagcttaccctcttctgcgaggtgagtgttgtgcaagattctgtcaacatttctggccagaataccatgaacatggtaaaggttcctgagtgccggctggcagatgagttaggaggactgtgggagaattcccggttcacagactgctgcttgtgtgttgccggccaggaattccaggctcacaaggctatcttagcagctcgttctccggtttttagtgccatgtttgaacatgaaatggaggagagcaaaaagaatcgagttgaaatcaatgatgtggagcctgaagtttttaaggaaatgatgtgcttcatttacacggggaaggctccaaacctcgacaaaatggctgatgatttgctggcagctgctgacaagtatgccctggagcgcttaaaggtcatgtgtgaggatgccctctgcagtaacctgtccgtggagaacgctgcagaaattctcatcctggccgacctccacagtgcagatcagttgaaaactcaggcagtggatttcatcaactatcatgcttcggatgtcttggagacctctgggtggaagtcaatggtggtgtcacatccccacttggtggctgaggcataccgctctctggcttcagcacagtgcccttttctgggacccccacgcaaacgcctgaagcaatcctaagatcctgcttgttgtaagactccgtttaatttccagaagcagcagccactgttgctgccactgaccaccaggtagacagcgcaatctgtggagcttttactctgttgtgaggggaagagactgcattgtggccccagacttttaaaacagcactaaataacttgggggaaacggggggagggaaaatgaaatgaaaaccctgttgctgcgtcactgtgttccctttggcctggctgagtttgatactgtggggattcagtttaggcgctggcccgaggatatcccagcggtggtacttcggagacacctgtctgcatctgactgagcagaacaaatcgtcaggtgcctggagcaaaaaggaaaaaaaaaaaagaaaggacattgagttttaacagaagggaaaaggaaagaagaaaagatttttgcagaatttctcaaaaatcagtttgtggattccagtagtatttatattgagagaaacaaattttagtccttctaactgtgctaaaacttggatatttgtgaaaactccttaccaccatacaagcatcagaagagctctcttgttgttagcacttattgtttgcaagaacagaatacatccttttatccttttatgaaaaatgacaagtgaaggcaaaaggggaaggttatttgatctggaagatgagtgttctgatgtggtggcttttgcaaaaatctttattggtgttgaaaactggaaaaaataactcatccagaattcatattgtcttgacaagaactatggttctctgtttttagatattgtggaaaatgtttttgggcatttttctctgattttatttcttctcccccacccctttttctaaaaaacaaacaaaaaaaaaaacacacaaaacaaaaacagaacaaaagaagagagaaggaaattttatcaattaaaaatgctgtgtgataaaatcccagcccagattgctcagctgtttgtacctgacttgccgcctgcataggagccagttctgttccttctgactagcccctcttcctccaggggagaacttccaaatgttaatttttttttttttgaaaatataaataattactattttgtactgtgtggtatctctggtcttttgtttcamtcacctgccttgtctcttgggtctgagtcccttgcttaagggattttgaagtcctagttttcagcttgcagagrttatgtctgaaatgcctaatgagtcgcagggatttgttgagactccgtaatctcaagtnctctttgtgagctatcagcatctgccagtctcttgtcctccctgagtatctcacagtccatatcctgatgagggatcaggcccctacctactccaaggcaagtaatggtagtgggcttttaaactgccccccgtatgttttaagacctaatccccacctcccttcttctaactaaatataaaaagatccaggggacataaatgtggagat

SEQ ID NO: 182 - DNA, 3517 bp, Homo sapiens
  misc feature (470): n equals a,t,g, or c
  misc feature (577): n equals a,t,g, or c
actggagagggagcgactggaacaagaacagctggagagagagagacaagaacgggaacggcaggaacgcctggagcggcaggaacgcctggagcggcaggaacgcctggagcggcaggaacgcctggatcgggagaggcaagaaagacaagaacgagagaggctggagagactggaacgggagaggcaagaaagggagcgacaagagcagttagaaagggaacagctggaatgggagagagagcgcagaatatcaagtgctgctgcccctgcctctgttgagactcctctaaactctgtgctgggagactcttctgcttctgagccaggcttgcaggcagcctctcagccggccgagactccatcccaacakggcattgtcttgggacsacttgcacctccacctcctccaccactcccaccagggcctgcacaggcttcagtagccctccctcctcccccagaaaaancctccacctcctccactcccatccaccgggcctccaccgcccctcctccccctcctctccctaatcaagtaccccctcctcctccaccacctcctgccccacccctncctgcatctggattctttttggcatccatgtcagaagacaatcgccctttaactggacttgcagctgcaattgccggagcaaaacttaggaaagtgtcacggatggaggatacctctttcccaagtggagggaatgctattggtgtgaactccgcctcatctaaaacagatacaggccgtggaaatggaccccttcctttagggggtagtggtttaatggaagaaatgagtgccctgctggccaggaggagaagaattgctgaaaagggatcaacaatagaaacagaacaaaaagaggacaaaggtgaagattcagagcctgtaacttctaaggcctcttcaacaagtacacctgaaccaacaagaaaaccttgggaaagaacaaatacaatgaatggcagcaagtcacctgttatctccagaccaaaatccacacccttatcacagcccagtgccaatggagtccagacggaaggacttgactatgacaggctgaagcaggacattttagatgaaatgagaaaagaattaacaaagctaaaagaagagctcattgatgcaatcaggcaggaactgagcaagtcaaatactgcatagaggaacagactaaggagagataggactttaatctggaggaaaaatatcctacaaacaacaactgttcacaacagcaaacccctacatttatgagctgtaagaagaaaatggagacaaacagaaggagggaaaaaccaacctactctgaaagccttcagacattatgactctggtgataagctctttccctctccgtttgctgcttttttctggcctttacaacagaatggaagagaatcatttaagagttcctgtaacagttatgcagaaaatactaaaacccatcaggcaagatcaccacgcattgaaatattttcatatcaagataaagtcgcacattttccacaatacattgctaaaataaagaggagaaaggcttaggaagtttttttgcagagagtgctggtaaagaattgagcaagtttgctattgtattgtaatgtttctctcaggtttgttcttcctatcatgtttgatattccatgaataattgagatcagccctatgtaagttaagatcataatatgtggaacaaatggaattgtaagtgctttcaaagggtaatatttataagaaagtgtccgaaaaatgtttcttcagcttgagaaattttagaatgataggaagtttctcgagttagccttcatgcaattttgtagattaaaacataaaatttgtccagaacttaaagatttagatgccttcctaaattgttacaatgctttaccaaatctatgacttctacataacacaaaccagtggtcaaatgtaaacactatattgtagatttactgtaggttttcaaccttttttagatttatgcatgtggacatttttataatgtaattacaatcaccacaaggttagcttttttaattgcagacagtaatgcatgtcacactaatatgtagtggccttttcaaggcctagtcccagggaaaacattttgtagagtataggggagtgggaggaaggggaggaataattttttatttaaagttgatttctgcactatctttttctcagttacctgcatgaataaataatgagaaatattttgtgactttaattggtaaatatgttacaaaaccaagtacttaatcttttacatcatgtcttcagctatttgtattttaaccagtaatttcaatggtctgaaacatgattctgagcttcacataatatcttaactgtggaactcaaaagtttgatcactgaatttggcagttattattacctaggtacccccgctgttacacaggtgtttagatacgtgttcctgaatgaagctgcttttgaattttgttatgttgaaatgcaagaaataacaatgatggcagcaattaaggtcacagaaatcattaggtaaaggaaaaccaatgaggagttctgcagttttcttttaataagtaaagtgagacttgggtggtgggaagaaggaaggtgggaagaaggaattagacactctgcctgccactctgcgtgtgtgtgctctcgcgcacgtgctgtctatatggaagccactcccttttctttcctttgaaactggtaaggttaaaataggggagaaatcctacatgttggaatgatagctttttggaaaatttaagaaactctccaggctctccatcttgatttatgcttgagttgttatgtgccatatttgctttgaactctgattatcagaagttttactaaaactttgaaataattcactttcatctgctttctagattttgtacatctcagtccataaagcaaagcttgttgatagtgtagttttctaaacgctgcaaatttgcagcctttaccactacaaagaagtttggatgagggattttttttttctttgtcaaaatagttcctgtttctgtagaaatttcatttttagattaaactgtgatggatgagctatcataattcaagtatacatttcttttttctatcagatattcattgtcatgcagtagtagtaaaaacatcaaagatgcagcaagcttattaagtattattttctaaaagaaataggaggcattttcatctttattattgtacttttggttatgcaaacactttgataatataaacagttatgtcccctataaatctggtcagcaacctcttttgattttgttgggtaagttaaatagtctgtagtaggtagagtactgggtacaagtggtccaaactaagataagagactaaaataaaatgctaaatcttaaaagaaactgggtttatgcactaaacgttttgtgccttggtctaatattaacatgatgtatgtgtaaactgacaaaaaaaaamaraaaawaaaaacccagtgttgattcatgctatatt

SEQ ID NO: 183 - DNA, 858 bp, Homo sapiens
  misc feature (840): n equals a,t,g, or c
  misc feature (841): n equals a,t,g, or c
  misc feature (850): n equals a,t,g, or c
ggagcccagcctcggccaggaagagatgatgggcgaggggtgggcggcggccctgcagcctagagttttggggccttggtgcgcgatggcaaccctgccaacgtttcccgggagctcagtttgtggcaggctctgccaagcactttatgtatcttgtatttcctccgcctcctaccggatcggtcggaaatggcagaggtggaggagacactgaagcgactgcagagccagaagggagtgcagggaatcatcgtcgtgaacacagaaggcattcccatcaagagcaccatggacaaccccaccaccacccagtatgccagcctcatgcacagcttcatcctgaaggcacggagcaccgtgcgtgacatcgacccccagaacgatctcaccttccttcgaattcgctccaagaaaaatgaaattatggttgcaccagataaagactatttcctgattgtgattcagaatccaaccgaataagccactctcttggctccctgtgtcattccttaatttaatgccccccaagaatgttaatgtcaatcatgtcagtggactagcacatggcagtcgcttggaacccactcacaccaatccagtgaccgtgtgtgggctggcggctcttctcccccaccaacggaacccctgtgtgcaccaaccttccccagagctccggagcgccctctcctcacttccaggttttggagcaagagcttgcaggaagcccgcacccagcttccttctgaccttcagttcactttgtcgcccttggagaaagctgtttttctttaactaaaaataaccaaaatgctaaaaaaaaaaaaaaaaaaaaaaaaaaannggggggggnccttttag

SEQ ID NO: 184 - DNA, 2387 bp, Homo sapiens
  misc feature (2373): n equals a,t,g, or c
  misc feature (2378): n equals a,t,g, or c
tacaaggctttggccgaccaagtgtgtaccatgctgctattgtcatcttccttgaattctttgcgtggggcctgttgacaactccaatgttgactgttctacatgaaacattttctcaacacacattcctcatgaatggtctcattcaaggtgtaaagggcctgctctcttttttgagtgccccactcattggtgccctgtctgatgtgtgggggaggaagccctttctcctcggcactgtattctttacctgcttcccaatcccactgatgaggatcagcccatggtggtattttgcgatgatttctgtgtctggagtcttctcggtcacgttttctgttatatttgcctatgtagctgatgtcactcaggagcacgagcgaagtacagcttatggatgggtctcagccacctttgsggctagtcttgtcagcagcccggccattggagcatatctttctgccagttacggagacagcctcgttgtgctggtggccacagtggtggctcttctggacatctgcttcatcttagtggctgttccagaatctctgcctgagaaaatgagaccggtttcctggggagctcagatttcttggaaacaagcagacccttttgcgtcgttgaagaaagttggaaaagattctactgtcttactaatctgcatcaccgtgtttctttcataccttcctgaagctggacagtattcaagtttttttctctatctcaggcaggtcataggttttggatctgttaaaattgcagcattcatagctatggtaggaattctgtctattgtggctcagacggcctttcttagcatcttgatgagatcattaggaaataagaatactgtcctccttggcttgggcttccagatgctccagttagcctggtacggttttggatcacaggcctggatgatgtgggcagcagggaccgtggctgccatgtccagcatcacgtttccggcaatcagtgccctcgtctctcggaatgcagagtcagatcagcaaggagttgcccaggggatcataactggaataagaggactatgcaatggcctggggccagcactgtatggcttcatattctacatgttccatgtggaactgactgagttgggcccgaaattgaattctaacaacgttcccctgcagggagctgtcatcccaggcccgccgtttttatttggggcatgtatagtccttatgtcttttctggttgccttattcattcctgaatacagtaaagccagtggagttcaaaaacacagtaacagcagcagcggcagcctgaccaacaccccagaacggggcagtgatgaggacattgagccactactgcaagacagcagcatctgggagctctcttcatttgaggagcctgggaatcagtgcactgagctgtaaactcggcagaaagtgggattctgcatacgccatctctgagagccatggagggagccacacccctggtgacttcatggtgctggatgggagacgctagcggcatccttcagggccaagtttgataaataccaccgccatcattctgctcatcctcctcctgtttttttttttctcttacattctttttttttttcctgtttatacattagaacaagataagatttgaaatacttccttgcaaataatgtgcaactcccaaggtgaaactcaaatagaaaaagtcatctctctggtagaaaggatggctttcctgtaatgactatagagtaagagtggcagcaatctttccatgcccttttcagcagaaggcacagaacagtagcgggactgccatctctggcaagatttcaggtaaagaatctcttcttaatttctaccttcctgtttctctgaatcagcccataggtgttgatgagtggccactcttaaagagtcactcagtatcagggatctactgtctttgttcaaaggtcaaataaaaacctagtctccttttattctactttctattcttagctagaatgaaactcagcatatatacacttctggacataataatattgaatagtaattacctttactagatgaaagaaattttcattacaaacttaaatcatgtaaaactcaacaactcagattcctggacctggtgtcctggttgggtccaaggtgattttacagaagaaaaaaacaactcaagcattctggtggcaacatagagattgtaggctgcttctaagaaagttattaacaatttggaaattcctaagtaggatgagagttagtaactggatacgagtgaagtttatatccaagttcagactcaaaggcattattatgatttgcttcttcccatgtcttccatgtcctgcttctcaaagggggggcccgttacccaatngcctntgatcatct

SEQ ID NO: 185 - DNA, 2885 bp, Homo sapiens
caattatattccagaagtgagaatcatgtcaattcccaaccttcgctacatgaaggagagccaggtcctcctgactcttacaaatccagttgagaacctcacccatgtgactctcttcgagtgtgaggagggggaccctgatgatatcaacagcactgctaaggtggtggtgcctcccaaagagctcgttttagctggcaaggatgcagcagcagagtacgatgagttggcagaacctcaagactttcaggacgatcctgacattatagccttcagaaaggccaacaaagtgggtattttcatcaaagttacaccacagcgtgaggagggtgaagtgaccgtgtgcttcaagatgaagcatgattttaaaaacctggcagcccccattcgccccattgaagaaagtgaccagggaacagaagtcatctggctcacccagcatgtggaacttagcttgggcccacttcttccttaaaaggttccactggagggcagatcccaaaggacagtatcaccgtaaacctgcgttaaaatgtggaagctgctgcttcattaggccttgtttataacgatgtacccatgcactacggaattctattgctaagaaagtgggagcataggcaaggcattgggaacacagggtagctgctgttgctcttgctctcacccctgttgacaccagtaagtctgtgtctccctcactgaaccctgcacgttgagtaacagcagcataattccatcctaggaaaggggatgggtgttccttggaatggcattgtatttaccacctgagaaactctgtactgtctcttgatctgatctcactaaggatcacaatgtcacagatgaaacttaaatgataacccaaaggtagacctgctgttaatgatccagcattggtcacaatgtaccaactgctttctgcattccgttaaatatcatctaacagtctaaaacatatcccttcattgccataatggctgccattttgccatagatttccatataactgaaaaactgaattgtcactttawctttagtatcatgatgattggaaaaacctgtgaagttgttaaggcactctcatttgccctctttttctaagtgaatacaggacacgtattagttgttcttaatttttttcccagtaaaatatggatcttttaagaagaatttgagaagcaaacaattacatgtcatgtcaagggggtagcagattccattcgttttcaatattgccacaatacccagggattaatgctgccacaggggggcaatctttatttgtcttacttcctaccccttccctgttctgcctctttaactcagttaagttgttctgtttgggacctggaaaagaacccaaagaaaacctgagtggacaggttcatttctggaatgcagaaaacattttaaaggctagatttttagaatattctcaactagcattctttccattgatttgaaggggaaattaactattataatctcttgaatccaaaactggatattaagaactttcccccttactaagtttaagacttttgtcatgtggtgagtcaaataagaccattttgattgtaaaccataaaatagttcagcaagtagcccacagttctggcctaacagcagacttgctgttttcacttggtatcctggagttgggttgctaaccttaatttctatgatgttttctaaaatgaaacttgataaagtagaccaccagctgcaccgtgttttctgtaaaagtattgttagtaagtggccaagagacttgaggaaaatacagattttttgtttaccttggtcttgttttaagtcttaaaaaattaaagataacattataatgtagaatacagatgggacatagtccttgtaagcttcccttgaaaatgttttaaatatttaggaagcttttaaaagacactaaattgtactctaaaagacactaaattgtactaattgtacaaaggtcaagccaattttatgaaacagtcctacagagtaatatatgtgatgcagtgtaagaaggaaaatactcatctctaacattatggtaataacatttagcctcttaggagttggagcagggggatgggtaattacagatttgcagactatagaaagagtttcatttttttgtgaccccacagagtctcaaatttttatttcactacctgctagagcctactgtgaaatcactgctccatatttgccagtggaggaaatgggcatagagtagagaatagcttcatatgtttacacgtttgcatagactacacacatgtcatgcgtttatggcaggtagctggtatttattccccaaagtaataatgttgaagtatgggtctcatcattcccatacacagaaacacaaaacactttgatcataaacttttttcttcagaagccaaactaacttgcagaataatagagccactggtttaatgtttcctcaagataggttttagtgtaagctagtattctgtgtgttcgtagaaatgattcaatacctgcagctggtgaattaggaattgtatttgttgccttttttatattagatgaggtgcaaaaattttaatgctagtcagtatgcaccaccacaggaaagttagatcccattagcacttgaaactacagctttggaaacttaggctaagttaatttggatttgttacttgattcacctactgaccttttcttttgkttgaagtgcttatcagcataatgagctaagkgtcatgcatatttgtgaagaaacaccctttttggtcccttttgggacagagaggtactccttgatctttatgaatgacaggttactgttttgccttattgcttaacttaatgtagtgaaataaagcagacaaagcttgaaaaaaaaa

SEQ ID NO: 186 - DNA, 2178 bp, Homo sapiens
  misc feature (2117): n equals a,t,g, or c
  misc feature (2132): n equals a,t,g, or c
  misc feature (2158): n equals a,t,g, or c
  misc feature (2168): n equals a,t,g, or c
  misc feature (2174): n equals a,t,g, or c
gcttctgtcctccgtttagtctcctcctcggcgggagccctcgcgacgcgcccggcccggagcccccagcgcagcgaccgcgtttgaaggatgacctctaggaagaaagtgttgctgaaggttatcatcctgggagattctggagtcgggaagacatcactcatgaaccagtatgtgaataagaaattcagcaatcagtacaaagccacaataggagctgactttctgaccaaggaggtgatggtggatgacaggctagtcacaatgcagatatgggacacagcaggacaggaacggttccagtctctcggtgtggccttctacagaggtgcagactgctgcgttctggtatttgatgtgactgcccccaacacattcaaaaccctagatagctggagagatgagtttctcatccaggccagtccccgagatcctgaaaacttcccatttgttgtgttgggaaacaagattgacctcgaaaacagacaagtggccacaaagcgggcacaggcctggtgctacagcaaaaacaacattccctactttgagaccagtgccaaggaggccatcaacgtggagcaggcgttccagacgattgcacggaatgcacttaagcaggaaacggaggtggagctgtacaacgaatttcctgaacctatcaaactggacaagaatgaccgggccaaggcctcggcagaaagctgcagttgctgagggggcagtgagagttgagcacagagtccttcacaaaccaagaacacacgtaggccttcaacacaattcccctctcctcttccaaacaaaacatacattgatctctcacatccagctgccaaaagaaaaccccatcaaacacagttacaccccacatatctctcacacacacacacacacgcacacacacacacacagatctgacgtaatcaaactccagcccttgcccgtgatggctccttggggtctgcctgcccacccacatgagcccgcgagtatggcagcaggacaagccagcggtggaagtcattctgatatggagttggcattggaagcttattctttttgttcactggagagagagagaactgtttacagttaatctgtgtctaattatctgattttttttattggtcttgtggtctttttaccccccctttcccctccctccttgaaggctaccccttgggaaggctggtgccccatgccccattacaggctcacacccagtctgatcaggctgagttttgtatgtatctatctgttaatgcttgttacttttaactaatcagatctttttacagtatccatttattatgtaatgcttcttagaaaagaatcttatagtacatgttaatatatgcaaccaattaaaatgtataaattagtgtaagaaattcttggattatgtgtttaagtcctgtaatgcaggcctgtaaggtggagggttgaaccctgtttggattgcagagtgttactcagaattgggaaatccagctagcggcagtattctgtacagtagacacaagaattatgtacgccttttatcaaagacttaagagccaaaaagcttttcatctctccagggggaaaactgtctagttcccttctgtgtctaaattttccaaaacgttgatttgcataatacagtggtatgtgcaatggataaattgccgttatttcaaaaattaaaattctcattttctttcttttttttcccccctgctccacacttcaaaactcccgttagatcagcattctactacaagagtgaaaggaaaaccctaacagatctgtcctagtgattttacctttgttctagaaggcgctcctttcagggttgtggtattcttaggttagcggagctttttcctcttttccccacccatctccccaatattgcccattattaattaacctctttctttggttggaaccctggcagttctgctcccttcctaggatctgcccctgcattgtagcttgcttaacggagcacttctcctttttccaaaggtctacattctagggtgtgggctgagttcttctgtaaagagatgaacgcaatgccaataaaattgaacaagaacaatgawaaaaaaaaaaaaaagkggggcggagtntcccttggggggtanttggtggcaggcgcgtttaagggatnggacctggtncaatangctg

SEQ ID NO: 187 - DNA, 1254 bp, Homo sapiens
  misc feature (7): n equals a,t,g, or c
  misc feature (1027): n equals a,t,g, or c
  misc feature (1110): n equals a,t,g, or c
  misc feature (1156): n equals a,t,g, or c
  misc feature (1195): n equals a,t,g, or c
gacgttnttgctacgtactctttatcaatcgtcttccggcgcagcccgtccctgttttttgtgctcctccgagctcgctgttcgtccgggttttttacgttttaatttccaggacttgaactgccatgtcctctgaagaaggaaagctcttcgtgggagggctcaactttaacaccgacgagcaggcactggaagaccacttcagcagtttcggacctatctctgaggtggtcgttgtcaaggaccgggagactcagcggtccaggggttttggtttcatcaccttcaccaacccagagcatgcttcagttgccatgagagccatgaacggagagtctctggatggtcgtcagatccgtgtggatcatgcaggcaagtctgctcggggaaccagaggaggtggctttggggcccatgggcgtggtcgcagctactctagaggtggtggggaccagggctatgggagtggcaggtattatgacagtcgacctggagggtatggatatggatatggacgttccagagactataatggcagaaaccagggtggttatgaccgctactcaggaggaaattacagagacaattatgacaactgaaatgagacatgcacataatatagatacacaaggaataatttctgatccaggatcgtccttccaaatggctgtatttataaaggtttttggagctgcactgaagcatcttattttatagtatatcaaccttttgtttttaaattgacctgccaaggtagctgaagaccttttagacagttccatctttttttttaaattttttctgcctatttaaagacaaattatgggacgtttgtagaacctgagtatttttctttttaccagttttttagtttgagctcttaggtttattggagctagcaataattggttctggcaagtttggccagactgacttcaaaaaattaatgtgtatccagggacattttaaaaacctgtacacagtgtttattgtggttaggaagcaatttcccaatgtacctataagnaaatgtgcatcaagccagcctgaccaacatggtgaaacccatctgtactaaacataaaaaaattacctggcatggtgggtgtncgcctgttatccccagtgacttgggaagcttgaagcaagaaaatcncttggaacccgggaaagcggaagttgcaatggagctaanatcgcgccactgttctcccagcctgggcaacagcgaaacccatctccaaaaaaaaaaaa

SEQ ID NO: 188 - DNA, 1479 bp, Homo sapiens
  misc feature (1464): n equals a,t,g, or c
caaaaaaaaaagaaaaaaaaatgttgaaccaattgtgaattacttatgtattattcatttctcatggggagagtaatgctgttgaagaacattacattgtaaactgccttcatttttggctctttgtttatgttcaggtttagtttacaaacccatttaagtatggaatgatttatatggggtcaggtgctccacaaaatagacctatgagaccaaaaatgacctaggctatttagacgacagcatgaaacttccacgttagttctcagtctataaaggcacttaccggtctctggtgtggtatgaccaatagaaacaccttatagtttgctttggacctcattttggaaaaataatctgcctttctaattgttctgcataggttaaaatgataaatttacattctttgaacctataccagattgtggtgtccgagtgaccggcacactgtctgacacacagtcagtgtgcacgtatttgtctgagtgaatgaggagacctgagaaaccggtgacgtggcacagggaagccagctggcccaggattccgtacatggccgcaagcagactaacgcgttgacgctaatttaatgtattttacctcacactaaggtcatgcttgataaagacgttaaactcaacttgtaaaatggtagcccagtgctatgccaggagtgggtgctcattagtgttgaatgaacacatttgtaatactacatgtaattccatctgactgctttgttaaattttcagttagaacgtagatactgtaaagtccacacacacattaaatcttgttttcctgaaagtatggcatcaaaaatacttgtagaaaaaccttgtcacaactgatttgaatgttcctattttctttgactttgatattggcttgtaatgtctcttttcatcatatgtaatatcagtggaacaggcagcgctactcaagtcctaaggattcctcagtgatcagtgatccagggccgttcatgaaccactgggctggatttgactgttgagtgtggcagttaatgcccctcaagaaatcaaaggatgtcttataagtgtcttccaaaaaaaagcaaatgctgaaatcctattggcaaagtaaactgaaattggctgctatattttatataatcatttctgcaaatcccattttttgaatactaatatttgacatggttaattcttattaatttgttggaattgtttattgttaataatgcaaatagataatttttaattatccacaagtaacatttcactgttaatggtttgaaataggtgataagcaaaccaatttgaaataaaatataaacatgtgccattgtattataacactatacactttcttgacagttaaatttaaaaaaaaattttttttggtagcatgtattgtatatgtttatagtatatgtagtaaataaaaatatggccaaaaaaaaaaaaaaaaaattactgcggnccgacaagggaattc

SEQ ID NO: 189 - DNA, 3411 bp, Homo sapiens
  misc feature (3097): n equals a,t,g, or c
  misc feature (3246): n equals a,t,g, or c
  misc feature (3260): n equals a,t,g, or c
  misc feature (3358): n equals a,t,g, or c
  misc feature (3384): n equals a,t,g, or c
  misc feature (3410): n equals a,t,g, or c
aaggatctgggtcaacatttccctttctgggataaaaataattgatgagaaaactggggtaatagagcatgaacatccagtaaataagatttctttcattgcccgtgatgtgacagacaaccgggcatttggttacgtgtgtggaggagaaggccagcatcagttttttgccataaaaaccgggcaacaggctgaaccattagttgttgatcttaaagacctttttcaagttatctataatgtaaagaaaaaggaagaagaaaagaaaaagatagaggaagccagcaaagcagttgagaatgggagtgaggccctaatgattctagatgaccaaactaacaaactgaaatcgggtgttgaccagatggatttgtttggggacatgtctacacctcctgacctaaatagtccaacagaaagcaaagatatcctgttagtggatctaaactctgaaatcgacaccaatcagaattctttaagagaaaatccattcttaacaaacggcatcacctcctgttctcttcctcgaccaacgcctcaggcatccttcttgcctgaaaatgccttttctgccaatctcaacttctttcccacccctaatcctgatcctttccgtgacgatcctttcacacagccagaccaatcgacaccttcttcgtttgattctctcaaatctccagatcagaagaaagagaattcgagtagctcgtctactccgctgagtaatgggcccctgaatggtgatgttgactactttggtcagcaatttgaccagatctctaaccggactggcaaacaggaagctcaggcaggcccatggcccttttcaagttcgcaaacccagccagcagtgagaactcaaaatggggtatctgaaagagaacagaacggcttctctgtcaaatcctccccgaacccttttgtgggaagccctcccaaaggactgtccatacagaatggcgtaaagcaggacttggaaagctctgtccagtcctcaccacatgactccatagccattatcccacctccacaaagtaccaaaccaggaagaggcagaaggactgctaagtcttcagccaatgacttgcttgcatcagacatctttgctcctcccgtctcagaaccttcaggccaggcgtcacccacaggacaacctacagccctgcagcccaaccctctggatctcttcaaaacaagtgctcctgccccagtggggcccctggtgggtctaggtggtgtaactgtcacactccctcaggcaggaccatggaacacagcatctttggtcttcaatcagtccccttcaatggctccgggagccatgatgggtggtcaaccttcaggttttagtcagcccgtcatttttggtacaagtccagctgtttcaggttggaaccagccttcaccctttgcagcctcaactccccctccagtgcctgttgtctggggcccttctgcatctgtggcacccaatgcttggtcaacaacaagccctttggggaatccttttcagagcaatatttttccagctcctgctgtgtccactcagcccccatccatgcactcctctctcctggtcactcctcctcagccacctcccagagctggccctcccaaggacatctccagtgatgccttcactgccttagacccacttggggataaagagatcaaggatgtgaaagaaatgtttaaggatttccaactgcggcagccacctgctgtgcccgcgcggaagggagagcagacttcttctgggactttgagtgcctttgccagttatttcaacagcaaggttggcattcctcaggagaatgcagaccatgatgactttgatgctaatcaactattgaacaagatcaatgaaccaccaaagccagctcccagacaagtttccctgccagttaccaaatctactgacaatgcatttgagaaccctttctttaaagattcttttggttcatcacaagcctctgtggcttcttctcaacctgtatcttctgagatgtatagggatccatttggaaatccttttgcctaaattctgaacttggtctgcagaccatccagaggaataaaaaggttggccttagtagtcaaaaacaaagctgatagccagacacgttctgatttctgcccttgttccagctttgacgtattatctgttgccttatttctcattgcctcttctacttgtaaaatgcttttcactttctgtctaggttaaagctaaactgaatctatggctttaaataaattaagatcctaaactctctagcttaagtgtaaatgaagtacagtagtttccctactgaaccctgcctcttgtgtccctggaaccttctagaacacctgccttctaccctctggttgggagatgcagccaccacatcccttcatatcatactgttttgaataaattttcaaatccttattgttcagagttgtttgggggttctgtttcagagcataaaacctaaaggttatagtagaacaaggcaccttcttaaaagaaatcttgcttcagaccatcagttacagagaatttctaaagtaaaattgaagcaactacaacttctccttagacactttggaatctaaccacttaaggacctttttaaagagatagcttctcttctttctgaagatcaatttctcccaaggccaagattgtccttttctcccatttcttgctagctattgcaaatgagggaagaacattattcatctctcctccccttttttttctgattcttttttcagtcagttttgctcctgggttcaagtagtattaccaccctttcacaagcaacagactctcacagggcaaaaaaaaaaaaaaaatctaatgattcacagacagatctggagcctctcttcattctcagtaattgctagtcccaagaactagaattgcaaatgggcacaacctatatccttcctgtggaagaggaggccactctcttgagctgaagttccagaagagcagttaatgttcaagagaaattgaactcaactcagcaacaaaggactctattttgaagagcaacatatcacaaagctaaatgtgattgtgccaaacacattasgtgcttanttgrggtcagccccaagtagaaagtcctgtggttttatgtttaatggtaatagttgatcatatatggcataattttctatcagcttcctactcagtcactataaacacagacttgaaatagtactttaaatgtccaaatacctaaatgngctaaactggaggnaactatttctagggaggtggaattttggaaggcatgatcaggcacacactggtttggacatacttatttctaagcacttttctggttgcaataaggtnttaattactcatttaataactggagngcagaaaaaaaaaaaaaaaaaaaccnt

SEQ ID NO: 190 - DNA, 2617 bp, Homo sapiens
  misc feature (8): n equals a,t,g, or c
  misc feature (10): n equals a,t,g, or c
  misc feature (18): n equals a,t,g, or c
  misc feature (42): n equals a,t,g, or c
gtggaggncnatgctganaactagtggatcccccgggactgncaggaattccccgggcggccctgggacatcttgctggggaggcagcggcggccccaggcccgggtactccctgcgcgtcccgcggagcccggcttcccggcccagtttccagcgcccggaatccttccactgtctgtctctgcccagagcaacctacgtgcagtaacgctgactccagagcgcacccgttgggcgatgaaggcggcacagcgtcgaaaaaacaaaagaataagaagaaaacgcggaacagggcctctgtggcaaatggaggcgagaaggcctcagagaaactcgccccagaagaagttcccctaagcgctgaggcccaggcacaacagttggcccaggaattggcttggtgtgtggagcaactggagctgggsctcaagaggcagaaacccaccccgaaacagaaagagcagstattggagcaatccgaaccctgcgcasmaaaagaacgcccttgccccggaagaggcagctgatgcactccttgtttggagactatagggctcagatggaagccgaatggcgtgaaggccctgcgggctctcagagctgctgcttattcagcccaggtgcaacctgtagatggagccaccagaaagaagagccaaagggtctgcaggcctcgctctatatggagagccaaagccactctggacatgcctgatgaagagtttaggttcaatttcttttagcgtctccccgaacctgaaacaatccccctcccttggggtggtgtaggggtttgttttgagtgcagagcctttccaggacttctgttgtcagagaaccctggagttggtctgtccctggctggtccaaggatttgtagctgttgtgaaggtgtgagaccatcagataggcaaaagaccccgttcgttttctgatgaaatgttctctctttcagaagagagagagaggtgcatttagaaaatatgcaataaattgaagtgagtgttcaaagtattgtagaaggaatattgtactcagtctttaggattagattaagtggctgttggtaacaaagattagtggagaagctgtataatcgtacactggttttcacttttgaaaggaatccctgtcaaaggtttagtgcttaatgctgttatgtcatattgccctaatctctatttttgataaaattggataaggagtgaaagagtatgctgaccacctatgttagaggaagtacagaagatgcaggggtgtggtatccctgggtccagtccctcacctggtacctttgtgcatgttgccttcattcctgagcaggtatcatcctcagggaaccagcatggcacctaccaggccaggctctgttcttaggagcaaggagcttcttgcgctaacagttctggcctgagacctggattgagccttggcagacttcttgtctaaatgttggccattcagtctcaggccctctgttccatggaattgggaatctccaggtgacctaatcctcattggtggcttgatgtttgctggtatcttccaaactcagttcccagactagattgatacctggagcccagctgcctactcagcatttccacttgggtgcttcataggcatttcaaacctgatgtgtttaaaacacttgattaggctccggttttcctttggcttctgcttttcagtgaatggcatgactgcctatgtgggtggcaagccacccaggtgccgaggaaagagactgagggcacgagctgttccagtataataaaatatataaaataagaagagttatactagatctagatcatagacatgattatatgtgagtatcattaatcattagtttatagcaattactctttattccaatattataataatcctcactctacaatcataacctaggaaaaaccaggccatacagagataggagccgaggggacatagtgcgaagtggccagaagacaagagtgtgagccttctcttatgccyggacagggccaccagagggcttggtctagcagtaacaccagtgtctgggaagatgcctgttgcaaagtggaccatggtctagcagtagcatcagtgtcaaggaaaaacacccactacttagcagactgggaaaaggagcctccctttccccgggggagtttagagaagactactcctccacctcttgtggagggcctgacatcagtcaggcccgcccgcagttatccagaggcctgtctccctgtgatgctgtgcttcagtggtcacgctcctagtccgctttcatgttccatcctgtatacctggctctgccttttagatagcaggagcaaattagtgaaagtactaaatgtctgatatgcagaaataatggcataagctgtctctctctcttctctctctctctgcctctgctgccaggcagggaagggccccctgtccagtggacacatgacccatgtgaccttacctattattggagatggttcacattccttaccctgcccctttgtcttatatccaataaatatcagtgcagcctggcatttggggccactactggtctccgcgtcttggtggtagtggtcccccaggcccaggtgtcttttcttttaaa

SEQ ID NO: 191 - DNA, 3144 bp, Homo sapiens
  misc feature (14): n equals a,t,g, or c
  misc feature (3144): n equals a,t,g, or c
gaactttataaatngggctttgcgcgccccagcccggagtcagaaaggcgaggggcgccgggaactggcgtgtgggactccagacaggagaggctgcgccttccccgcaccgggaccttcgcgacacaccagatcctcgcccctggctcgcgcgaacgcacaggatgaccaccaccctcgtgtctgccaccatcttcgacttgagcgaagttttatgcaagggtaacaagatgctcaactatagtgctcccagtgcagggggttgcctgctggacagaaaggcagtgggcacccctgctggtgggggcttccctcggaggcactcagtcaccctgcccagctccaagttccaccagaaccagctcctcagcagcctcaagggtgagccagcccccgctctgagctcgcgagacagccgcttccgagaccgctccttctcggaaggggcgagcggctgctgcccamccagaagcagcccgggggcggccargtcaaattccagccgctacaagacggagctgtgccgcccctttraggaaaacggtgcctgtaagtacggggacaagtgccagttcgcacacggcatccacgagctccgcagcctgacccgccaccccaagtacaagacggagctgtgccgcaccttccacaccatcggcttttgcccctacgggccccgctgccacttcatccacaacgctgaagagcgccgtgccctggccggggcccgggacctctccgctgaccgtccccgcctccagcatagctttagctttgctgggtttcccagtgccgctgccaccgccgctgccaccgggctgctggacagccccacgtccatcaccccaccccctattctgagcgccgatgacctcctgggctcacctaccctgcccgatggcaccaataacccttttgccttctccagccaggagctggcaagcctctttgcccctagcatggggctgcccgggggtggctccccgaccaccttcctcttccggcccatgtccgagtcccctcacatgtttgactctccccccagccctcaggattctctctcggaccaggagggctacctgagcagctccagcagcagccacagtggctcagactccccgaccttggacaactcaagacgcctgcccatcttcagcagactttccatctcagatgactaagccagggtagggagggacctcctgcctactccagcccctaccctgcacccacatcccataccctcttctccctacccatcccattccccacaggccctacattaacaaggttaagctcaacccctttcccccagcacctcagaatgtgccctccctctccccctcataaccccacctaacataaggacaagtcaatttgtcagtagcttcttctggcttgaaaccccctccctggattttatagcccacttaccatgcataacagacaagtcccatattttgtcagtagatgcctttttttttccggcttaagccttaagtgccaaatcacaagagaaaaagcagtaacagtttacagaagcaacttagtgccttgtaatctaactttgtcactgtgactacattacctcttcagcgccagagggcacccgtgggcctcccggagcctctgcccatggcggggtggagacccggaaccagcagccccctccactggcgacacaactgcaccttccctcatttcagtctcccgcacacttattcctcctcccctcttcccggtggcacctctccacctgtacccgcccccgccccaccaccccggccccttggaagagttgttgccagaccagggttttgggggaaacctgtcttgacattcaaaacctttttcttcccgatctgaacccctgttgactaatcttgcctgggtttgtgtaggtctgcaggaaggaaggctgaaaaagcggacgaagattttgacttaagtgggactttgtgatttaattttttcttttttttaagtggggaggaaggggaagctagatggactaggagagacttgattttggtgctaaagttccccagttcatatgtgacatctttttaaaaaaaataacaacaaaaaaaaaatgagagaaaagctaaaaaaaaaaaagtaaggggtgagcagttaatggtattcattccacatacaatatctgtgtaaaacgatttcctgtagaagtagctttaatggtttttgctctagaataccgtagtctatccttagagcactcacgccatgctttcttccctgggttttaaacttcatataactttcagaaattggagagcaaaaattttgcttgtcactgcacatcaatataaaaaagcttatttaacttatcaaaacgtatttattgccaaactatgcttttttttgttaattttgttcatatttatcgggatgacaaatccatagaatatattcttttatgttaaattatgatcttcatattaatcttaaaattttgtgacgtgtctttttcctttttttccacagttttaatatattattcttcaacgacattttttgtaactttacacttttttggttattttattttaaaaaaatgaaaaattaatttaaaaaaatgcaaaaaactgttggattatttattttagaaattcccccctttgtgttggactgcaaattgagtttctttctctttaggcctttcacaactaggactgagaatgtatgtaaaagttctgtgacagtacagaaggaaaacaactttttatgtatagcttctaaaaggggaaaaaaaaaaaaaagagaaaccctttgacttccacgtgcccatctcaagacattccactcacagatttgaggttctggattccaggtctggagttttccaatgttaatgtaaacagaactggcacacacacattaagatgaatgtaattattattcctcttgctggtcactaccgtcgctttctatttctctttctttgtgtgaatttatttaaaagaaaaaaaaactttttgtaacgactatttgcagtttaaaaatcaataaaccccgttttttcaagaaaaaaaaaaaaaaaaaaaaaaaaaaaaaaaaaaaaaaaaaaaaaaaaaaaaaaaaaaaaaaaaaaaaaaaaaaaaaaaaagggcggcccttttaaan

SEQ ID NO: 192 - DNA, 2570 bp, Homo sapiens
  misc feature (2561): n equals a,t,g, or c
tcgacccacgcgtccgggagtctttataatacctttgtgatagaagaaaaacatggtttcaatcagcagactttgggattcttcatgaaagatgcagtcaagaaatttattgtgactcagtgcattttattgcctgtgtcttcacttctactttacattattaaaattgggggygactatttttttatwtatgcctggctrttcacattagttgtktctctggtkcttgtcacaatytatgctgattatattgcccctttatttgacaaattcacacctctgcctgagggaaagcttaaasaagaaattgaagtaatggcaaagagtattgactttcctttgacgaaggtgtatgttgtggaaggatctaaacgctcttcccacagcaatgcttatttttatggcttcttcaagaacaagcgaatagttttgtttgacactctactagaagagtactctgtactaaacaaagacatccaggaggattctggcatggaaccccgcaatgaggaagaagggaacagtgaagaaataaaagctaaagttaaaaataagaaacaaggatgtaaaaatgaggaggtactcgctgtactaggccatgaactggggcactggaagttgggacatacagtcaaaaatatcattattagccagatgaattctttcctgtgtttttttttatttgctgtattaattggtcgaaaggagctttttgctgcatttggtttttatgatagccaacccactcttattggactattgatcatcttccagtttattttttcaccttacaatgaggttctttctttttgcctaacagtcctaagccgcagatttgagtttcaagctgatgcatttgccaagaaacttgggaaggctaaagacttatattctgctttaatcaaacttaacaaagataacttgggattccctgtttctgactggttgttctcaatgtggcattattctcatcctccactgctagagagacttcaagctttgaaaactatgaagcaacactgagatgtccaggatctgtgactgaagacatttctgattatttctgtcctggcagcatgttccagctcttgatgtttttaaacttttttttagaagaaaaattaagtacagaaaagcccagatttaaatacatttaatatgtcattttaaaaatgattttaataattcatttcttaaaacactgaatgaattttgaagcttaatgtttttaaaggcatagttttatctttgacatctaatttaccatcaagttgtaaaattatttggaaaaatacagaactcgttttatttgtatacttatatggaatctgcatgtgaggtgtttgagggcatatgtttgaaagagggagcatcaccacaggaatcctttctgtgaggtggaaacagtggtcctgaatcattgtgctcacacctaacttgaaatctggtcttactttcatgctgttatgatttcacctggtgaatcagtgttttaaataagaaaggtaatagttggtaaggccaatgttatttaaatgaaagtagttagaaaaatgctctcctattctaccaaatttttaatttctttcttccctttcttgctacacagtgatcaagagtttctcatagtgctttgaagttagaaattatgtataggatattttaaatcattgagttttgtggggtttttttgtttgtttgtttcttttgttttttggaaaatccgtgtctttatctttttttcccacgtggtagatatgatcccattggaggtaaattgtagcttcttctcattcatgcagtaaataatacatcctttcactcagcagagatggccatattaaacacgttttgctatgttaaaagtggcagaacaggaaagacgaattaaaaataacattttttaagcgacataaggatgaaatactgatgaatctctgtgacattacagggaaaaaaatatagttttctatctctttcaagggcagaagagttttcatttttatttttgtaattttatctgtaagtcataaatattacttaatcaggcctgattctacttttgaaaattacagttcttgaaatgcagataatgtttactttgaaaacaaatgtcatgaatgatttccagtttttaaagctatatgtttcactgcttcatatctctgtccactttctgaatgagaacttattttgtgcctagagctctcactcactgataatgcttattaccttctgggcatttattccaaagtgggatcaactgtacgcctttggtatctgaccataaagtcttttgctccgctgacatttgggtgatgtcttcacatggaaatataataaaaataaaaatctagtttaatactgcattatttattttcctaaggctaaagaggagcagtcctatgcttttattcagcatcctttatctgtgacttcatgctctgataactgcctttccttccttctgtgcctttgaatacaaatttcagttctgcaaaagtgaaacattaaacattgccaacgcaaatgtaaaaaaaaaaaaaaaaaactcgggggtncttttgggg

SEQ ID NO: 193 - DNA, 1524 bp, Homo sapiens
gcgtcgatcggccggacaggcggcagcgkcsgctcctgcagcggtggtcggctgttgggtgtggagtttcccagcgcccctcgggtccgaccctttgagcgttctgctccggcgccagctacctcgctcctcggcgccatgaccacaaccaccaccttcaagggagtcgaccccaacagcaggaatagctcccgagttttgcggcctccaggtggtggatccaatttttcattaggttttgatgaaccaacagaacaacctgtgaggaagaacaaaatggcctctaatatctttgggacacctgaagaaaatcaagcttcttgggccaagtcagcaggtgccaagtctagtggtggcagggaagacttggagtcatctggactgcagagaaggaactcctctgaagcaagctccggagacttcttagatctgaagggagaaggtgatattcatgaaaatgtggacacagacttgccaggcagcctggggcagagtgaagagaagcccgtgcctgctgcgcctgtgcccagcccggtggccccggccccagtgccatccagaagaaatccccctggcggcaagtccagcctcgtcttgggttagctctgactgtcctgaacgctgtcgttctgtctgtttcctccatgcttgtgaactgcacaacttgagcctgactgtacatctcttggatttgtttcattaaaaagaagcactttatgtactgctgtcttttttttttttcttttgaagaacaggtttctctctgtccttgactcttgggtctgtgggccatggcatgagtgttttctagtagtagattggagggaaagctttgtgacacttagtactgtgtttttaagaagaaataatttggttccagatgtgttagaggatcttttgtactgaggtttttaacactttacttgggtttaccaagcctcaactggacagaccataaacagtccacaggcaccgttcctgccaggccccaacccacagggagtctctccgcagagccttcttggtgttgccctaacttgccagtggcctttgctcagagcctcctcctgtgacatgtgaacaatgaagaggcctgcgcctcctgccttgccgcctgcaaagcaaagaaactgccttttattttttaaccttaaaaagtagccagatagtaacaagactggctggctgatgagcaaagcctttgctctcacgcagaggaaggcttggatgtacaatgaaactgcctggaactaaaagcagtgaagcaagggaggcaatcacactgaagcgggtcttcctccaggaacggggtcccacaggcgtgttgttttaaataacctgatgctgtgtgcatgatgctggtgcttgaccatgaaaggaaagtctcatccttaaaatgtgttgtacttcacaatcctggactgttgcttcaagtaaacaatatccacattttgaaaaaaaaaaaaaaaaaaaaaaaaaaaaaaaaaaaaaaaaaaaaaagggcggccgctcgcgatctagaac

SEQ ID NO: 194 - DNA, 1678 bp, Homo sapiens
  misc feature (621): n equals a,t,g, or c
agctttcgtaggccagtagcaatgttgtgttcacagtctaatttccaaaagaccatcaataaaaaagagagcatgtttaaattgaaatggaacttagagaacttgagcttacttacgtacttcaatgccaccggtaacttaggttttaccaccaaatgctgttaacattaaatcattttgaaaatcttggatgaaaggtgctatgtaaatggaaatacaaaggattcttactaacatacaaaaataatgcacaacagaaatatctaaaaccttttccgtagactttgaaacatctctctctgtcataactccctgggattcaagtagcacattggtaataggtatcagagcagtctagagacaattgcatgtcaaaaaatgtacattcatttttaggtggataaaagtaaacatagaaattatgttatggctaaatacagttagtgggtaacttagatttatattagctagcatctaatttgcacaactagaacacatcccagaacaattactgaaaagctgaaatttaatgggtggtgatgtagcccaatgagggcgaatgacattccagcttgacctctccagaacacttaatatcctaaaatacagaacatgctgggnttaagtgcattagtgcttcaagcagaaaatgctgaaaacaacgtgtaaagtactgaatctgagtaggctgaccctgagaagggacaattaaagagacaaccaagggaacacattgagactacaaaaatatgaataatctcaattatattcatcacacttttttcataccatttcaagaaacractagacagtagtaaccacatgaatattttactttctccagtataccttgagaagcaaactttgtaggaagccactcttctcccctaaacaacttctgccaaacaataataaagccaactggaaacgaatcggagccattttcattttcctaaccggggcctgacatgctttaaattatctggctgtattctaaatcaacacctaacccctcaaggaaactgaagaatcaatatacagggtaatagctttggctcagagctccaataatgtgcttcagatctgtccatgtggaaatgctttcatccaaatttttaaattggtggttaccaaagagttcacaaaacaggtttgtatgtagcacctttcatgcaaggcatgcaaaaagcctattttaaaatcactgtgcatattatagagttgtagccacctcacaatgaagtactacagcctgtgctgtcttaatggtttatgtcaggaaatgaaaaagatactgtaccaaatctggaattacaatggggagtaataatgtatactaaatgacttttgtattttaagttactttttgtgagtggtgaatttttgtgtttttcttttcagctacacttagtcctgagatgtattttttctttaagtcttgaatgaatacaaaaggagcccattttataatataaaccttgatgtacatgttgagatatttggacaatgaaaatgccttaaaaggaatgcatatggataaagttgcacttataacacccttcaacaaaatctaattttaaattgtctttttcttttctattaagggttttctttttcagtgtctaccattgtacttataactgttattaaatacaatggtagacactgaaaaaaaaaa

SEQ ID NO: 195 - DNA, 2824 bp, Homo sapiens
ggcgaacgccgcgaccccagcggacccgcggcccagccttgatcccccaaccccgggggctggcatgagcggcccctcggcggcaccgtggggcggtggagtcgcctccgcctgatccccggcctgtcgcccgaccccacctcgccaaccgaggcggaccgcggagtgtgcgaacgaccccaccgctgctttctcctcccccagatcacgcaccccagctccggaagatggggaactgcctcaaatcccccacctcggatgacatctccctgcttcacgagtctcagtccgaccgggctagctttggcgaggggacggagccggatcaggagccgccgccgccatatcaggaacaagttccagttccagtctaccacccaacacctagccagactcggctagcaactcagctgactgaagaggaacaaattaggatagctcaaagaataggtcttatacaacatctgcctaaaggagtttatgaccctggaagagatggatcagaaaaaaagatccgggagtgtgtgatctgtatgatggactttgtttatggggacccaattcgatttctgccgtgcatgcacatctatcacctggactgtatagatgactggttgatgagatccttcacgtgcccctcctgcatggagccagttgatgcagcactgctttcatcctatgagactaattgagccagggtctcttatctgacttcaagtgaaccaccattttggtgttttgatcttttgtcactgagcccaaagagccagggattaggaattaagatcgtgcacaaaagtttccttaaaattcctggatggctgcagatgttgggggaaaaagtacgtgatattttagaaacttagtgggaaaagtaggatggtatttttatgtaaagccttgacccaatgtttaaaaatataattgtatttagatcttgttattgctccagtacataggaattgtgtaaagtgttaacagcagctgtatttgtttaaattgtgtgtattgaagattaggaaaaagatagtagttatttttcctaaatgaaataactttcttctcttccccttccccacccgaattcttttctgaagttgctggcatttgggtcaaggttttattaaaagctacattttataacactggcacacacaaaaaagtagttttaagcttgtttgcacagttctttttttccattggaaatggaattcattgccttaggtctttttaaatagtgtattattatcgttggggctggctctatgcttgaaaaccagtttatttataacctgttataagtgctatattctgtttgcagttaggaaatgcagaattcaaagtgatctcctagcttgtaagcaaactgagatgcactatcccttttctataaaaaataagttaatgtgtcaagaaaccaactctattaaggtggggtttaatattaccctttcctatgtgttttatctaattattttggttgttaatatggtgataatggaaagtcaagttaaattttaaatattaagaattctgatttattgagattgaattatgccaccacgtttatgtaaaaatgaaggtggcaccgtggtgagacctaatgagaaatagttactcagttgtaaaaattttgatttattctctttcttctgacctccttgcctcttgtcttgaaccatagcaaaaggatactgcatctctcattactgtagtgctgaggttattgaagttatacaaaacacatctcagtctctgtttcttggaaaggtatctattacatcctgctagctgactgacaaaactaagcagggagaataaagataattgtattttatgttttgcacacaaacgcagaatttgtataaccatatgacttcatagttgtgatctcaaaaaagaaggaatttctcctttgtttcttgcagttaatgtaagaatactttaaatctctaagcttctgaagtgttagaggtagagatggtctagtaaagatgtagtagtaatgttttatccatttagcatgtgtttattttttcatatgtactcaaaggtgacttattggttcacctcagtgatattacagctaaaaaaatcattcattagcaaaaggaaaagtggtctcaacctaacatcagaagtgtttcttattattattttatattgagttgaatattgaactctaacagttttctacatacaaaacacagtgtcatgaaggttattcataattgcattatagaggaatgtagtatgtcataagtactttgtaaagatttgacattcaactgtagtatccatatgttgcttaaatttccttatgagccccatgatggaaagacttaaagatgaatttgagaaaaattgaaagaaattagattatcaggttctgttaaattgttacatgtatcttgcttaaatttctgtttattaatttatatccacccaagtacataaagcaaatttggaggaaacaactgaagttgtgcaatattttctgataattgctttttttattcttgtgttttctacttaaacataatgtctgtgtcatcaagtattatagtcagacttttctttttttctagattgttaaaattggcaaatgaacttttttaaaaatcatcttccatgttgcagttagtctttcttttcattacaagtctttcacagaagtttggtggtaatattgaaagaactrgcattgggcagaatgtgtcttttttaggcactttatattctcaacatacaatgttaagaaccatcaattttgacttttactaagttgttaaataaagttataatacagctgtgaaaaaaaaaa

SEQ ID NO: 196 - DNA, 4260 bp, Homo sapiens
  misc feature (4155): n equals a,t,g, or c
  misc feature (4199): n equals a,t,g, or c
  misc feature (4209): n equals a,t,g, or c
  misc feature (4254): n equals a,t,g, or c
ggacaggtacaaggaaactccagtataaaactagaactggatgcttcaaagaaaaaagaatcaaaagaccatcagctcctacgctatcttttagataaagatgagaaagatttaagatcaactccaaacctgagcctggatgatgtaaaggtgaaagtggaaaagaaagaacagatggatccatgtaatacaaacccaaccccaatgaccaaacccactcctgaggaaataaaactggaggcccagagccagtttacagctgaccttgaccagtttgatcagttactgcccacgctggagaaggcagcacagttgccaggcttatgtgagacagacaggatggatggtgcggtcaccagtgtaaccatcaaatcggagatcctgccagcttcacttcagtccgcactgccagacccacttccaggctaaatagattacctgagctggaattggaagcaattgataaccaatttggacaaccaggaacaggcgatcagattccatggacaaataatacagtgacagctataaatcagagtaaatcagaagaccagtgtattagctcacaattagatgagcttctctgtccacccacaacagtagaagggagaaatgatgagaaggctcttcttgaacagctggtatccttccttagtggcaaagatgaaactgagctagctgaactagacagagctctgggaaattgacaaacttgttcaggggggtggattagatgtattatcagagagatttccaccacaacaagcaacgscacctttgatcatgggaagaaagacccaacctttattcccagccttactcttctccttctcctactgccaatctccctagccctttccaaggcatggtcaggcaaaaaccttcactggggacgatgcctgttcaagtaacacctccccgaggtgctttttcacctggcatgggcatgcagccaggcaaactctaaacagacctccggctgcacctaaccagcttcgacttcaactacagcagcgattacagggacaacagcagttgatacaccaaaatcggcaagctatcttaaaccagtttgcagcaactgctcctgttggcatcaatatgagatcaggcatgcaacagcaaattacacctcagccacccctgaatgctcaaatgttggcacaacgtcagcgggaactgtacagtcaacagcaccgacagaggcagctaatacagcagcaaagagccatgcttatgaggcagcaaagctttgggaacaacctccctccctcatctggactaccagttcaaatggggaaccccgtcttcctcagggtgctccacagcaattcccctatccaccaaactatggtacaaatccaggaaccccacctgcttctaccagcccgttttcacaactagcagcaaatcctgaagcatccttggccaaccgcaacagcatggtgagcagaggcatgacaggaaacataggaggacagtttggcactggaatcaatcctcagatgcagcagaatgtcttccagtatccaggagcaggaatggttccccaaggtgaggccaactttgctccatctctaagccctgggagctccatggtgccgatgccaatccctcctcctcagagttctctgctccagcaaactccacctgcctccgggtatcagtcaccagacatgaaggcctggcagcaaggagcgataggaaacaacaatgtgttcagtcaagctgtccagaaccagcccacgcctgcacagccaggagtatacaacaacatgagcatcaccgtttccatggcaggtggaaatacgaatgttcagaacatgaacccaatgatggcccagatgcagatgagctctttgcagatgccaggaatgaacactgtgtgccctggagcagataaatgatcccgcactgagacacacaggcctctactgcaaccagctctcatccactgaccttctcaaaacagaagcagatggaacccaggacaagaagacagaagagttcttctctgtggtgactacagactagaggaatgctctacaggtgcaacaggttcaggtgtttgctgacgtccagtgtacagtgaatctggtaggcggggacccttacctgaaccagcctggtccactgggaactcaaaagcccacgtcaggaccacagaccccccaggcccagcagaagagcctccttcagcagctactgactgaataaccacttttaaaggaatgtgaaatttaaataatagacatacagagatatacaaatatattatatatttttctgagatttttgatatctcaatctgcagccattcttcaggtcgtagcatttggagcaaaaaaaaaaaaaaaaaaaaaaaaaggagtttgcttttgtcgggagattgaaagatgtttttgtttctttctttgtaaaggccttggatattgaaaaaataccaaggcagaacagttggacaatctatttcttgagccaaatttaattattcttatttttgtaatcagtcattggcttcttatctggatgaaggcttttggaggagaaccaaaacgacaagttccaagaagaagatgaagctccgcctccgccgcttagtcccaaccctgcccaggaagaagggcccgtggggctttgcctgtgcccgtccaccaaaggctgtcatgtgtctcgaaatcagcagccctccccatcccaatcccaggcagcttgtgtgtacaatcagcttctctagcaactctgtatctgttggcttcaagagaatattttgcctccacatatgtaccccttctcctttttttaaagatggatttaaaccaagatgcctccaggaaagaggacgaaatgagtatattcacagaggaatccaaaaaatacagtttgggggaaaatgcaataatttttgatgagatgggtgaaggacaagaagtgagttgtgtcaattattgtagatacaattttctgattaaatctggaaaaataaaaggcagcctgttttttctgcttttattgtattaacagctgaggtagctaaagttatttaaaataaaattaaatttatgatccaagtagcttatttttccctttaaatctcattgtaaatatatttgatttcttgtagaaattgatttccttctgtttaattttatgcttttattatactcttgatttttctaaatttgtgtgtgaaatataacattgattgaattgcagttacatttggttagtaatatttcattattttaataactgtgatgtcatgtatggatttactttggggttcaaatcaaaatgtcactgccagaaagagctgttccagctgatctagagcatactgccctagagtgtccctgggatcatctgaacagaagtgcacaggctacttgtacagagaaaaaattaatactcaaaggaaatcttcattttttagattgactttgggaatttgaattttcatcagtgcaaatataaatttctctatcctgctctgaggctaattggtaccatattttccctttgtgtcttgtgactctgccacatcccatctcatcctggcctctgagtcaagaacccagtgaactgactttctagttctagaagttccgctgcaaggccaggaaagcttgagaaaggtattgtggaagaagcaaaggtagacccccatcactcacctttgtctgcatccctgggcctgtgaatgatgacagcacctgacattctgcaccagctacctctgcctccatggcagagaaaaggccataagaacagtggaagaggagcatggactcagacttcaaggaagaagccatttccccaggtccttccttctgcatctcaccacccctagttacaaataactccattgaacagcatctattcagaaactatgccgaataaaaagattggtggaagggctcatgtggttagcaactatgaaacagaaataggacactcagttacaaacattatctcctttagtttttcagaaaatgcatccmtgatttcattcatttccagcttgaaagccagccatattactctagtccctaccaaactgctctagaaggtcatttccattttgtttgtggatattttaggacgcggcagactttcagggaagtttcaccttttaactttcaggcatttccaganggaagttttcccggaactcagtggctttttggcataagggaacntaggaaaaanaaagttaaggggaaattggggagaaggctaacatccttcccccantcccaa

SEQ ID NO: 197 - DNA, 3117 bp, Homo sapiens
  misc feature (164): n equals a,t,g, or c
agtgtatttaatcggttctgttctgtcctctccaccacccccacccccctccctccggtgtgtgtgccgctgccgctgttgccgccgcagcctcgtcagcctgcgcagcccctcacaggaggcccagcccgagtgcagtccagaagcccccccagcggaggcgncagagtaaaagagcaagcttttgtgagataatcgaagaacttttctcccccgtttgtttgttggagtggtgccaggtactggttttggagaacttgtctacaaccagggattgattttaaagatgtctttttttattttacttttttttaagcaccaaattttgttgttttttttttttctcccctccccacagatcccatctcaaatcattctgttaaccaccattccaacaggtcgaggagagcttaaacaccttcttcctctgccttgtttctcttttattttttattttttcgcatcagtattaatgtttttgcatactttgcatctttattcaaaagtgtaaactttctttgtcaatctatggacatgcccatatatgaaggagatgggtgggtcaaaaagggatatcaaatgaagtgataggggtcacaatggggaaattgaagtggtgcataacattgccaaaatagtgtgccactagaaatggtgtaaaggctgtctttttttttttttttaaagaaaagttattaccatgtattttgtgaggcaggtttacaacactacaagtcttgagttaagaaggaaagaggaaaaaagaaaaaacaccaatacccagatttaaaaaaaaaaaaacgatcatagtcttaggagttcatttaaaccataggaacttttcacttatctcatgttagctgtaccagtcagtgattaagtagaactacaagttgtataggctttattgtttattgctggtttatgaccttaataaagtgtaattatgtattaccagcagggtgtttttaactgtgactattgtataaaaacaaatcttgatatccagaagcacatgaagtttgcaactttccaccctgcccatttttgtaaaactgcagtcatcttggaccttttaaaacacaaattttaaactcaaccaagctgtgataagtggaatggttactgtttatactgtggtatgtttttgattacagcagataatgctttcttttccagtcgtctttgagaataaaggaaaaaaaatcttcagatgcaatggttttgtgtagcatcttgtctatcatgttttgtaaatactggagaagctttgaccaatttgacttagagatggaatgtaactttgcttacaaaaattgctattaaactcctgcttaaggtgttctaattttctgtgagcacactaaaagcgaaaaataaatgtgaataaaatgtamaaatttgttgtgtttttttatgttctaataatactgagacttctaggtcttaggttaatttttaggaagatcttgcatgccatcaggagtaaattttattgtggttcttaatctgaagttttcaagctctgaaattcataatccgcagtgtcagattacgtagaggaagatcttacaacattccatgtcaaatctgttaccatttattggcatttagttttcatttaagaattgaacataattatttttattgtagctatatagcatgtcagattaaatcatttacaacaaaaggggtgtgaacctaagactatttaaatgtcttatgagaaaatttcataaagccattctcttgtcattcaggtccagaaacaaattttaaactgagtgagagtctatagawtccatactgcagatgggtcatgaaatgtgaccaaatgtgtttcaaaaattgatggtgtattacctgctattgtaattgcttagtgcttggctaatttccaaattattgcataatatgttctaccttaagaaaacaggtttatgtaacaaagtaatggtgttgaatggatgatgtcagttcatgggcctttagcatagttttaagcatcctttttttttttttttttttgaaagtgtgttagcatcttgttactcaaaggataagacagacaataatacttcactgaatattaataatctttactagtttacctcctctgctctttgccacccgataactggatatcttttccttcaaaggaccctaaactgattgaaatttaagatatgtatcaaaaacattatttcatttaatgcacatctgttttgctgtttttgagcagtgtgcagtttagggttcatgataaatcattgaaccacatgtgtaacaactgaatgccaratcttaaactcattagaaaaataacaaattaggttttgacacgcattcttaattggaataatggatcaaaaatagtggttcatgaccttaccaaacacccttgctactaataaaatcaaataacacttagaagggtatgtatttttagttagggtttcttgatcttggaggatgtttgaaagttaaaaattgaatttggtaaccaaaggactgatttatgggtctttcctatcttaaccaacgttttcttagttacctagatggccaagtacagtgcctggtatgtagtaagactcagtaaaaaagtggatttttaaaaataactcccaaagtgaatagtcaaaaatcctgttagcaaactgttatatattgctaagtttgttcttttaacagctggaatttattaagatgcattattttgattttattcactgcctaaaacactttgggtggtattgatggagttggtggattttcctccaagtgattaaatgaaatttgacgtatcttttcatccaaagttttgtacatcatgttttctaacggaaaaaaatgttaatatggcttttttgtattactaaaaatagctttgagattaaggaaaaataaataactcttgtacagttcagtattgtctattaaatctgtattggcagtatgtataatggcatttgctgtggttacaaaatacttcctctgggttataataatcatttgatccaattcctattgcttgtaaaataaagttttaccagttgatataaaaaaaaaaaaaaaaaaaaaaaaagggcggccgctcgcgatctagaactagtc

SEQ ID NO: 198 - DNA, 2483 bp, Homo sapiens
  misc feature (59): n equals a,t,g, or c
  misc feature (149): n equals a,t,g, or c
cgcctgcaggtaccggtccggaattcccgggtcgacccacgcgtccgggtaaagctgtncctattcctccacatccaatatacattccgccttctatgatggaacatacgcttcccccacctccatccggactgccttttaatgcgcanctagagagcggttaaaaaaccctaatgctcctatgttaccgccacctaaaaacaaagaggattttgagaagactctgtcgcaagccatagtcaaagtggttatcccaacagaaaggaatttgctcgccctgatacatcgaatgatagagtttgttgtacgtgaagggccaatgtttgaagctatgrttatgaacagagaaatcaacaatcctatgttcaggttcttatttgaaaaccagacaccagcccatgtttactataggtggaagctttattctattctgcagggagattctccaactaaatggcggacggaagattttcgtatgttcaaaaatggatctttttggaggccaccaccattaaatccgtacttgcatggaatgtcagaagagcaagaaacagaagcttttgtagaggaacctagtaaaaagggagcacttaaggaagaacagagggataaattggaagaaatcttgcggggattaactccaaggaaaaatgatattggagatgcaatggttttctgtcttaataatgctgaagctgctgaagaaatagtggattgcattactgagtcgttgtccatcttaaagacaccccttcctaaaaagattgccagattatatttggtttctgatgttttgtacaactcttcagccaaagttgctaatgcttcatattatagaaaattttttgaaacaaagttatgtcagatattttcagacctcaatgccacctatcgtacaattcaaggccatttacaatctgaaaactttaagcaacgggtaatgacttgcttcagagcatgggaagattgggcaatttatccagaaccatttttgatcaaactacaaaatattttcttaggacttgtaaatattattgaagaaaaggaaacagaggatgttccagatgaccttgatggtgcccccatcgaggaagagcttgatggtgcacctctggaagatgtagatggaattcctattgatgctactcccatcgatgatcttgatggagtccctataaaaagtcttgatgatgatcttgatggagtgcctttggatgcaactgaagactcaaaaaagaatgagcctatatttaaagttgccccatcaaaatgggaagctgtggatgaatctgaattggaagcacaggctgttacaacttctaaatgggaattatttgaccagcatgaagaatcagaagaagaagaaaatcaaaatcaagaagaagaaagtgaagatgaagaagatactcaaagttccaaatctgaagaacatcatttgtactctaatccaatcaaagaagaaatgactgagtctaagttctctaagtactctgaaatgagtgaggaaaaacgagccaaacttcgtgaaattgagctcaaagttatgaagtttcaggatgaattggaatctgggaaaagacctaaaaaaccaggccagagttttcaggagcaagtagaacactacagagataaacttcttcaacgagagaaagagaaagagttagaaagagaacgagaaagagacaagaaagataaagaaaaattggaatctcgctccaaagacaagaaggaaaaagatgagtgtactccgacaaggaaggaaaggaagaggcgacacagtacatcccccagcccatctcgcagtagcagtggtagacgagtgaaatccccatcaccaaaatcggagcgatcagagcgttcagaaagatctcataaagagagctcacggtccaggtcatctcacaaagattctcctagagatgttagcaaaaaagccaaaagatcaccatctggttcaaggacacctaaaaggtctaggcgatcacggtctagatctcctaaaaaatcaggaaagaagtccagatcccagtccagatctccacacaggtctcataaaaagtcaaagaaaaacaaacactgacgtaaatttttaagatgctgtcacttattggaaatgcgatttgttttgtgcctgaacggtctgttttttaaaaaaacaaaaaatcaaatgaaagagcattcctggggttttttgtttgtttgtgtatgcatgtgtaaactcatgagcaactgcatctgtagatctgtcattgttttatattgtgtaaattactttcattgtggctatttctcaagatgaaatttttattgttctaatggatttcatcagaaatgtgtataatggatctgctgacagtagtagtattttgttttaggatgttgtgacttagcaaaaataatacagatgtcttccccccttttgtagctttgacaatttgaattagatttcaaataaaatctgaacagaaaactaaaaaaaaaaa

SEQ ID NO: 199 - DNA, 1238 bp, Homo sapiens
  misc feature (634): n equals a,t,g, or c
  misc feature (1209): n equals a,t,g, or c
ggcacgagagaagaggcctgtggacagaacaatcatggtcaggggccaggggttctatgggaagagctggggctggggttggggctggggcttggaggacacctgggcgaagtcaggctatgggatggaggtcacgggccgggaagggggcccaactgtggtgaacagcccggctggaagaacagagagacagtggctctgggtttaggctcaggaagtggatctctgcacctccttgagtgtcccccaagagtccccgtggagaaggcgggaacccagcctctgctccgccccccaagctgaktgccctggtgargggtatctactctgtgggaagggtgccttttctcaatgttcacaaaggcatcagatgggccggcgcgatgctcctcttcattagtggatggagaaacaggtttggggaaggggtgagggctgaggccaggccatttcagctcttcctgggtccctccggcagtctggactccctggtggtgtgcgaggtagacccagagctaacagaaaagctgaggaaattcckcttccgaaaagagacagacaatgcagccatcataatgaaggtggacaaagaccggcagatggtggtgctggaggaagatttcaggtgatgggntggggtgattgggactgggaggtacagggtgtgcgaggtagacccagagctaacagaaaagctgaggaaattccgcttccgaaaagagacagacaatgcagccatcataatgaaggtggacaaagaccggcagatggtggtgctggaggaagaatttcagaacatttccccagaggagctcaaaatggagttgccggagagacagcccaggttcgtggtttacagctacaagtacgtgcatgacgatggccgagtgtcctaccctttgtgtttcatcttctccagccctgtgggctgcaagcsggaacaacagatgatgtatgcagggagtaaaaacaggctggtgcagacagcagagctcacaaaggtgttcgaaatccgcaccactgatgacctcactgaggcctggctccaagaaaagttgtctttctttcgttgatctctgggctggggactgaattcctgatgtctgagtcctcaaggtgactggggacttggaacccctaggacctgaacaaccaagactttaaataaattttaaaatgcaaaaaaaaaaaaaaaaaaaaaaaaaaccnggggggtttttttggggggcccggggccc

SEQ ID NO: 200 - DNA, 640 bp, Homo sapiens
gttacccggggcaacagctgagccgtctgggaagggatgcatctgaaaaaacactatatccaacaactcagatatggcagaagtgaagtcaatgttccgggaagttcttccaaagcaagggccactgtttgtggaagatataatgacaatggtgctgtgtaaacccaaacttttacccttaaaatctctgactctggaaaaactagagaaaatgcatcaagcagcacagaatacaattcgccaacaagaaatggcagaaaaggatcaacggcaaataacccactgaatgataactgagcactttagggaacaacctgccttatctactatttaacaataactagaaaatatgcttctgtgtgctgaaagtagtatgtgttatcaataaaattgatagtattcatagaaatacaaaaatatccaagattgatgaaatttgtattgtgaatgtaaacactctggtttgtattgaacmtaaacagttaaactatgaaccmagttttatggggtttaagtcatgtttttagaattgcaaattaaattatttgttcaccattcctattgctatcttttatagataacattcttgggatcttttatagcattcttgggcacaagggattaaatacaacttttatat

SEQ ID NO: 201 - DNA, 1439 bp, Homo sapiens
  misc feature (1): n equals a,t,g, or c
  misc feature (3): n equals a,t,g, or c
  misc feature (1437): n equals a,t,g, or c
  misc feature (1439): n equals a,t,g, or c
nangcgggcccccgaagtatcaggtgtcctctcatattcctgccccctgtcagtggaactgcagatgtctttttccggcagattttggctctgactggatggggttaccgggttatcgctttgcagtatccagtttattgggaccatctcgagttctgtgatggattcagaaaacttttagaccatttacaattggataaagttcatctttttggcgcttctttgggaggctttttggcccagaaatttgctgaatacactcacaaatctcctagagtccattccctaatcctctgcaattccttcagtgacacctctatcttcaaccaaacttggactgcaaacagcttttggctgatgcctgcatttatgctcaaaaaaatagttcttggaaatttttcatctggcccggtggaccctatgatggctgatgccattgatttcatggtagacaggctagaaagtttgggtcagagtgaactggcttcaagacttaccttgaattgtcaaaattcttatgtggaacctcataaaattcgggacatacctgtaactattatggatgtgtttgatcagagtgcgctttcaactgaagctaaagaagaaatgtacaagctgtatcctaatgcccgaagagctcatctgaaaacaggaggcaatttcccatacctgtgcagaagtgcagaggtcaatctttatgtacagatacatttgctgcaattccatggaaccaaatacgcggccattgacccatcaatggtcagtgccgaggagcttgaggtgcagaaaggcagccttggcatcagccaggaggagcagtagtgtgtctctcgctgtcaatgatgagttgacccggtgtgttcttgtatagtcagtggcatcagcacccgtcagccggccttttccttcaggttcgtcaggctcaccggttctcactgtgtctgggaagtaggactgatggtcatcttcatgacaggcggcatctccactaagcctgtgtaactgttccctctttggttttcttagcttttgaatttgaagaagtacttttgaagactcccattttaagaaccgtgcarattttgctaccaaaagtcttcaccactgtgttcttaagtgaatgttaatttctgaggtttgggactttgtggtggtttttttcttcttttcttttccattcttctttctttctttttatgttgtttgctgtaaatgctgcacatccagattgcatatcaggacattggttattttatgctttcttggatataaccatgatcagagtgccatggccactaccccactgtttgctctcctgcaaatcaactgcttttaatttacacttaaacaaattgttttgagtgttagctactgcctttctagatattagtcatttggaataaaaattcaatttcactgaaaaaaaaaaaaaaaaancn

SEQ ID NO: 202 - DNA, 1247 bp, Homo sapiens
gaatatatttacccttcttggattcaactattagttcaatgtcgatagctcccaaatcaacattaccaacctgggtctttgactcaagccctagaacatactcccaccgtgaccagccaatgtgccttcttatagtgtctactcattggtctttgttctgcccagtgataacaatgggataacgcctgctacacatcttcattgtgaaacccttcccctgtgctgagattaaatgaactctaagattattaaatagtatattttccttgacagcctagcgtttgatgattttaaagccttatgtataaataaaccaaaggaagtaagcagtcatattgctaatttgctaactcctatctattgaatggtgaagttttaaaaatttccccaggtaagtttaagattcaaacaccatctattgagcacctacattgtgtgccaggtagtaaaataggtgctttcatacacattgtctcaattcctgtgaggtcagaattatctctgcatttgaaacttgaggaaacatgctcagagtgcaagaagcttccttgcctgagatcacctagaaaggaaccctcagagccggcaactgaatcttggtccctgtgatgtcaagcccattgctctcccactgcagaacatggcctctagattaatgccaccgattcaggaacacctccgacagtcttgaaatacccccatgttgccttgtttgttttttccttctggcttcttctattacagtctcttcattggaagctctgtaggccaaggccagagctgatactgacacggagccaatgcagatagcacatcagatgctaggggtcgctgggaggattaagggacttaatctgctaggaacacctgtacttgaagtggaggaggctagggggccacagttgctgcttcattaacatagaggttttggatttttttctcttgtggtttgttttttaagtggattggcagactccttgttgcttaagagtggctttctaggcaggccactggcatctgaattcatcattgacaataaatgtaagaaattggaataaaaaagagagacctgctgttattcgcttttgttctccagtgatttgattaactcagggcaaggctgaatatcagagtgtatcgcactgaagaataataatccattcagtaatgttatagttatcctcaatctaaatatgtcaactgtcattttgctacttttcaaataaaatacttgaaaactgtcaaaa

SEQ ID NO: 203 - DNA, 746 bp, Homo sapiens
  misc feature (25): n equals a,t,g, or c
  misc feature (37): n equals a,t,g, or c
  misc feature (626): n equals a,t,g, or c
gaattcccgggtcgacccacgcgtnccgggaagacgnatcacgccggccaagaacgagactcgcaaactgggcatttctccgagccgggctagagcaagtagcgagactccgcgtgagagtgggaaagagccttaacaggcaaccatgttgcccagtgggttttctgtgcctttgggtgcggaccaatgaggcgcgtggggcgggacttccgcttcgcctaggtgttgtcgtccctgctagtactccgggctgtgggggtcggtgcggatattcagtcatgaaatcagggtagggacttctcccgcagcgacgcggctggcaagactgtttgtgttgcgggggccggacttcaaggtgattttacaacgagatgctgctctccatagggatgctcatgctgtcagccacacaagtctacaccatcttgactgtccagctctttgcattcttaaacctactgcctgtagaagcagacattttagcatataactttgaaaatgcatctcagacatttgatgacctccctgcaagatttggttatagacttccagctgaaggtttaaagggttttttgattaactcaaaaccagagaatgcctgtgaacccatagtgcctccaccagtnaaaagacaattcatctgggcactttcatcgtgttaattagaagacttgattgtaattttgatataaaggtttaaatgcacagagrgcmgggtmcargsagccatagttcacaatgttgat

SEQ ID NO: 204 - DNA, 2170 bp, Homo sapiens
  misc feature (2166): n equals a,t,g, or c
  misc feature (2168): n equals a,t,g, or c
agcgaacaggcaccctggccctggcggcggcgstctgccsgaggcggcmgcaaggtcttcttcctcaaaggtacgccctcggggaagctcggggcggccgacacccctgaggttttgcccggtacccctggctctcggctcccgggggatcgccccacctgcagcgcgtgggctggaagtacattwatctctggaacttgtmattggctttgtttggctctggaaacaaagacttgcctgggcctttccgatgtaaacttccagcccttggtgggtgggggagttgtatgaaggtgccgtgtcccggtgtcactaatggggaaaaaaaatgtctttgtattcccaggaggatacgaagcgttttcggcttcctgcccggagctgtgcagcaaacagtcgacccccatggggctcagccttcccctgagtactagcgtccctgacagcgcggaatctgggtgcagttcctgcagtaccccactctacgatcaggttagtaggtgtccctgccacagggaagaagtaagaactggcaaaggcatggaagagtagtgccagggagaatatagaaagtgacctgcagcattatttataacggaggggacacagggatatgatttattccacagttaagtggtctgacggagccgagtctccaattgtaggctctacggaaatgaacttgctggtcctgcccaggcaaatgggcttagttccctatttatttatcctccagcaacagaactgagttcactcggtatctgaaattgacttttccagcagaaagtttttgtgggtatgggcactggccttggctttgagcaagcttgatgaatgttggatatttctggatttcagggtggcccggtggaaatcctgccctttctgtacctgggcagtgcgtatcacgcttcccgcaaggacatgctggatgccttgggcataactgccttgatcaacgtctcagccaattgtcccaaccattttgagggtcactaccagtacaagagcatccctgtggaggacaaccacaaggcagacatcagctcctggttcaacgaggccattgacttcatagactccatcaagaatgctggaggaagggtgtttgtccactgccaggcaggcatttcccggtcagccaccatctgccttgcttaccttatgaggactaatcgagtcaagctggacgaggcctttgagtttgtgaagcagaggcgaasatcatctctcccaacttcagcttcatgggccagctgctgcagtttgagtcccaggtgctggctccgcactgttcggcagaggctgggagccccgccatggctgtgctcgaccgaggcacctccaccaccaccgtgttcaacttccccgtctccatccctgtccactccacgaacagtgcgctgagctaccttcagagccccattacgacctctcccagctgctgaaaggccacgggaggtgaggctcttcacatcccattgggactccatgctccttgagaggagaaatgcaataactctgggaggggctcgagagggctggtccttatttatttaacttcacccgagttcctctgggtttctaagcagttatggtgatgacttagcgtcaagacatttgctgaactcagcacattcgggaccaatatatagtgggtacatcaagtccatctgacaaaatggggcagaagagaaaggactcagtgtgtgatccggtttctttttgctcgcccctgttttttgtagaatctcttcatgcttgacatacctaccagtattattcccgacgacacatatacatatgagaatataccttatttatttttgtgtaggtgtctgccttcacaaatgtcattgtctactcctagaagaaccaaatacctcaatttttgtttttgagtactgtactatcctgtaaatatatcttaagcaggtttgttttcagcactgatggaaaataccagtgttgggtttttttttagttgccaacagttgtatgtttgctgattatttatgacctgaaataatatatttcttcttctaagaagacattttgttacataaggatgacttttttatacaatggaataaattatggcatttctattgaaaaaaaaaaaaaaaaaaaaaaaaaaaaaaaaaaaaaaaaaaaaaaaaaaaaagngngg

SEQ ID NO: 205 - DNA, 2620 bp, Homo sapiens
  misc feature (563): n equals a,t,g, or c
  misc feature (1838): n equals a,t,g, or c
  misc feature (2596): n equals a,t,g, or c
  misc feature (2609): n equals a,t,g, or c
tcgacccacgcgtccggcgttcaacagatcctgatcgcttccaggtaatgttctgctactttgaggataaagctattcagaaagacaaatctgggatgatgcagtgtgtgattgcagtcgcggacaaagtattcgatgccttcctgaacatgatggcggataaagccaagaccaaggagaacgaggaggagctggagcggcacgtcagttcctgttggtgaacttcaaccacatccacaagaggataaggagggtggcagacaagtatctatctggtctggtggataagtttccccacttgctctggagcgggactgtgctgaagaccatgctggacatcctgcagaccctgtcactgtcactgagcgctgatattcacaaggatcagccttactatgacatccccgacgccccctaccggatcacggttcctgacacgtacgaagcccgtgagagcattgtgaaggacttcgctgcacgctgtgggatgatcctccaggaggccatgaagtgggcacctaccgtcaccaagtcccacctgcaggaatatctgaacaaacatnagaactgggtatcgggactgtcccagcacacggggctggccatggccactgagagcatccttcactttgctggctacaacaagcagaacacaactcttggggcaactcagctgagcgagcgcccggcctgtgtgaagaaagactactccaacttcatggcatccctgaatctgcgcaaccgctacgcgggcgaggtgtatggaatgattcggttctcaggcaccacaggccagatgtctgacctgaacaaaatgatggtccaggatctacattcagctttagaccgcagtcatcctcagcactacacgcaggccatgttcaagctgaccgcaatgctcattagcagtaaagattgtgacccgcagctccttcatcatctgtgctggggtcccctccggatgttcaatgagcatggcatggagacggccctggcctgctgggagtggctgctggctggcaaggatggagtggaagtgccgttcctggtcacctggcacaccatcgacgccgatgctcagagctcagccatgtgctgtgctgggcgcccacggacycacccacaggcctctcctacttctccagcatgtacccgccgcaccctctcacggcgcagtacggggtgaaagtcctgcggtccttccctccggacgccatcctcttmtacatcccccagattgtgcaggccctcaggtacgacaagatgggctatgtgcgggagtatattctgtgggcagcgtctaaatcccagcttctggcacaccagttcatctggaacatgaagactaacatttatctagatgaagagggccaccagaaagaccctgacatcggcgacctcctggatcagttggtagaggagatcacaggctccttgtccggcccagcgaaggacttttaccagcgggagtttgatttctttaacaagatcaccaacgtgtcggctatcatcaagccctaccctaaaggcgacgagagaaagaaggcttgtctgtcggccctgtctgaagtgamggtgcagccrggctgctmcctgcccagcaaccctgargccattgtgctggacrtcgactacaagtctgggaccccgatgcagagtgctgcaaaagccccatatctggccaagttcaaggtgaagcgatgtggagttagtgaacttgaaaaagaaggtctgcggtgccgctcagactccgaggatgagtgcagcacgcaggaggccgacggcagaagatctcctggcaggcagccatcttcaaggtgggagacgactgccggcangacatgctggccctgcagatcatcgacctcttcaagaacatcttccagctggtcggcctggacctctttgtttttccctaccgcgtggtggccactgcccctgggtgyggggtgatcgagtgcatccccgactgcacctcccgggaccagctgggccgccagacagacttcggcatgtacgactacttcacacgccagtacggggatgagtccacyctggccttccagcaggcccgctacaacttcatccgaagcatggccgcctacagcctcctgctgttcctgctgcagatcaaggacagacacaacggcaacattatgctggacaagaagggycatatcatccacatcgactttggcttcatgtttgaaagctcgccgggcggcaatctcggctgggaacccgacatcaagctgacggatgagatggtgatgatcatggggggcaagatggaggccacacccttcaagtggttcatggagatgtgtgtccgaggctacctggctgtgcggccctacatggacgcggtcgtctccctggtcactctcatgttggacacgggcctgccctgttttcgcggccagacaatcaagctcttgaagcacaggtttagccccaacatgactgagcgcgaggctgcaaatttcatcatgaaggtcaatccagaagctgctttcctcagcaacaggagccggacctacgacatgatcccagtactatcaagaaatggacatccccctacttgaggaaggggganctttccgaggggncttcttggccc

SEQ ID NO: 206 - DNA, 1014 bp, Homo sapiens
  misc feature (1005): n equals a,t,g, or c
  misc feature (1007): n equals a,t,g, or c
  misc feature (1009): n equals a,t,g, or c
gcagtaaggcgcggrgcgggctgtccggccccaggggtycgagcccgcggcgccatggctcacgtcggctcccgcaagcgctcgaggagtcgcagccggtcccggggacgggggtcggaaaagagaaagaagaagagcaggaaagacacctcgaggaactgctcggcctccacatcccaaggtcgcaaggccagcacggcccctggggcggaggagagaagcaagcagaaggcccggaggagaacaagatccagctcctcctcctcttcttccagttcttctagctcctcttcttcctcctcgtcctcctcctcttcctccagtgatggccggaagaagcgggggaagtacaaggacaagaggaggaagaagaagaagaagaggaagaagctgaagaagaagggcaaggagaaggcggaagcacagcaggtggaggctctgccgggcccctcgctggaccagtggcaccgatcagctggggaggaagaggatggcccagtcctgacggatgagcagaagtcccgaatccaggccatgaagcccatgaccaaggaggagtgggatgcccggcagagcatcatccgcaagtggtggaccctgagacggggcgcaccaggcttattaagggagatggcgaggtcctagaggaaatcgtaaccaaagaacgacacagagagatcaacaagcaagccacccgaggggactgcctggccttccagatgcgagctgggttgcttccctgagggcccccgctggccaaggcctgtggacgacgctggcggcccagcctgggcaggtttcagggtgccagtgggaagcctgatgggtgctggtggcctttcccccgtggattggtctctggcccagcccagtctcttctcaggggcagggggtggaggttggggtcaccggcctgcttggcacccccatctgaaagagcagcacttctcagctattaaaggccccctggatagamaaaaaaaaaaaaagggggccctcaaaggncnanttaga

SEQ ID NO: 207 - DNA, 1367 bp, Homo sapiens
  misc feature (13): n equals a,t,g, or c
  misc feature (649): n equals a,t,g, or c
  misc feature (1362): n equals a,t,g, or c
  misc feature (1363): n equals a,t,g, or c
  misc feature (1364): n equals a,t,g, or c
cggacgcgtgggncagaaatcacagaaaccccgagactcttcagttgaagttcgtagtgattgggaagtgaaagaggaaatggattttcctcagttgatgaagatgcgctacttggaagtatcagagccacaggacattgagtgttgtggggccctagaatactacgacaaagcctttgaccgcatcaccacgaggagtgagaagccactgcggagcatcaagcgcatcttccacactgtcaccaccacagacgaccctgtcatccgcaagctggcaaaaactcaggggaatgtgtttgccactgatgccatcctggccacgctgatgagctgtacccgctcagtgtattcctgggatattgtcgtccagagagttgggtccaaactcttctttgacaagagagacaactctgactttgacctcctgacagtgagtgagactgccaatgagccccctcaagatgaaggtaattccttcaattcaccccgcaacctggccatggaggcaacctacatcaaccacaatttctcccagcagtgcttgagaatggggaaggaaagatacaacttccccaacccaaacccgtttgtggaggacgacatggataagaatgaaatcgcctctgttgcgtaccgttaccgcagtggnaagcttggagatgatattgaccttattgtccgttgtgagcacgatggcgtcatgactggagccaacggggaagtgtccttcatcaacatcaagacactcaatgagtgggattccaggcactgtaatggcgttgactggcgtcagaagctggactctcagcgaggggctgtcattgccacggagctgaagaacaacagctacaagttggcccggtggacctgctgtgctttgctggctggatctgagtacctcaagcttggttatgtgtctcggtaccacgtgaaagactcctcacgccacgtcatcctaggcacccagcagttcaagcctaatgagtttgccagccagatcaacctgagcgtggagaatgcctggggcattttacgctgcgtcattgacatctgcatgaagctggaggagggcaaatacctcatcctcaaggaccccaacaagcaggtcatccgtgtctacagcytccctgatggcaccttcagctctgatgaagatgaggaggaagaggaggaggaagaagaggaagragaagaggaagaaacttaaaccagtgatgtggagctggagtttgyccttccaccgagactacsagggcctttgawgcttartggaawgkgkgtctaacttgctctytkacatttagcagatgaaataaaatatatatctgtttagtctttcaaaaaaaaaaaaaaaaaaaaaannnaaa

SEQ ID NO: 208 - DNA, 1498 bp, Homo sapiens
  misc feature (1436): n equals a,t,g, or c
  misc feature (1460): n equals a,t,g, or c
tgcaggtaccggtccggaattcccgggtcgacccacgcgtccgtgagttgatagtgataagctcctaaggatttttaacttgtacttttgtgaacgaagagaatgcataaataatgttggtgaggataaagtacagatatttcatgtagaattaattgctagttatgatgcttgtggatagttaactgttttttttttagtcaaaatgatcatgctacgaaaagatgcttctgagagaatgtaatgagtaactgatttttcttcctgagtcgcccttgccaaatatgttactgtattaattaatctaatattgagtgattatttgtaaaattatgaatatgggaaatccatctatctacagcctaagttacacataagtttcagaaagtctgattagactaaagagatatttcttctgggacagcckycttcttggtaattttgaagttctttttacaagttccttcctcagtttcagttctttccagtgttttgtagctcactgtcactcactgaatagagaaacgtgtgccctatacttcctgtgacaatcattttgctgacagaatgatggatgtttaaaatattgcacaaagtactttaaagaaaggtctgttaggaccagaagcagagacaccacttttcaaaggacttcttggtttcagcataacctaagacagggaattgggagccatcatatgtcacagtgttcagaattcaagcatatttaagggcattttctttgattctcaaagttcagcattcattttgaattgagaagcctatacatttagctgacaaagtgcttatagaatttcttaacaactgaaccattcaaaaggattttttttgtttaaaactggatttcaatgtaagcaaatgaagaaaaaaatatagatttcatttccatagcttcttatccctgtattgaggtaataaattgttttactgacaatttttcctttttctacactaaaacaatatgtgatatatttcccctcttgaagaggcaattcattaaactctcaaattttctatagaatcaagatagaacctttagatactccaactcaccaaaatgtaaaaaaactaacaaaaatatttggtcttcaataatgctaaatatctacatttttagaatttatcaacatttaactagataattgggcatgtcttaattatgcatgtacttatccatactaataaaattgacaatgctagtgcatacttattggtttagtcctattatcaggatataatcatctgtgaggaggatattttaaatactgtaaatgataacagttaatgatatacacatttagactgagttgcacactggcagggagaccaaaaacattacttccatacttgtgtcatggawtctkttttttttgagagagtctcactctgtcgccgggctggagtacagtgggcanggatctcgggctcactgcaacccnctggcctcccggggttcaagccaatctccggccttcag

SEQ ID NO: 209 - DNA, 2365 bp, Homo sapiens
  misc feature (19): n equals a,t,g, or c
cttgaacccgtccatcctncatgtctctgttttttaaaactgacgacacttgtgattcctacccctcttccagcttcttttgccaactgaagccttcttctgccacttctgcgggctccctcctctggcaggcttcccccttgatcgacttcttggttttctctctggatggaacgggcatgggcctctctgggggagggcgaggcccgtggggcagggctggaatgggagacctgttggcctgtgggcctcacctgcccctctgttctctcccctcacatcctcctgcccagctcctcacatacccacacattccagggctggggtgagcctgactgccaggaccccaggtcaggggctccctacattccccagagtgggatccacttcttggttcctgggatggcgatggggactctgccgctgtgtagagaccagtgggatgggctctacctctctttctcaaagagggggctctgcccacctggggtctctctccctacctccctcctcaggggcaacaacaggagaatggggttcctgctgtggggcgaattcatcccctccccgcgcgttccttcgcacactgtgattttgccctcctgcccacgcagacctgcagcgggcaaagagctcccgaggaagcacagcttgggtcaggttcttgcctttcttaattttagggacagctaccggaaggaggggaacaaggagttctcttccgcagcccctttccccacgcccacccccagtctccagggacccttgcctgcctcctaggctggaagcatggtcccgaagtgtagggcaagggtgcctcaggaccttttggtcttcagcctccctcagcccccaggatctgggttaggtggccgctcctccctgctcctcatgggaagatgtctcaragccttccatgacctcccctccccagcccaatgccaagtggacttggagctgcacaaagtcagcagggaccactaaatctccaagacctggtgtgcggaggcaggagcatgtatgtctgcaggtgtctgacacgcaaktgttgtgagtgtgagtgtgagagatggggcgggggtgtgtctgtaggtgtctctgggcctgtgtgtgggtggggttatgtgagggtatgaagagctgtcttcccctgagagtttcctcagaacccacagtgagaggggagggctcctggggcagagaagttccttaggttttctttggaatgaaattcctccttccccccatctctgagtrgaggaagcccaccaatctgccctttgcagtgtgcagggtggaaggtaagaggttggtgtggagttggggctgccatagggtctgcagcctgctggggctaagcggtggaggaaggctctgtcactccaggcatatgtttccccatctctgtctggggctacagaatagggtggcagaagtgtcaccctgtgggtgtctccctcgggggctcttcccctagacctccccctcacttacataaagctcccttgaagcaagaaagagggtcccagggctgcaaaactggaagcacagcctcggggatggggagggaaagacggtgctatatccagttcctgctctctgctcatgggtggctgtgacaaccctggcctcacttgattcatctctggttttcttgccaccctctgggagtccccatcccattttcatcctgagcccaaccaggccctgccattggcctcttgtcccttggcacacttgtacccacaggtgaggggcaggacctgaaggtattggcctgttcaacaatcagtcatcatgggtgtttttgtcaactgcttgttaattgatttggggatgtttgccccgaatgagaggttgaggaaaagactgtgggtggggaggccctgcctgacccatcccttttcctttctggccccagcctaggtggaggcaagtggaatatcttatattgggcgatttgggggctcggggaggcagagaatctcttgggagtcttgggtggcgctggtgcattctgtttcctcttgatctcaaagcacaatgtggatttggggaccaaaggtcagggacacatccccttagaggacctgagtttgggagagtggtgagtggaagggaggagcagcaagaagcagcctgttttcactcagcttaattctccttcccagataaggcaagccagtcatggaatcttgctgcaggccctccctctactcttcctgtcctaaaaataggggccgttttcttacacacccccagagagaggagggactgtcacactggtgcttctctacagttcacagaggtctttcagctcatttaatcccakgaaagaaagaaaaaaaaaaaaaaaaaaaaaaaa

SEQ ID NO: 210 - DNA, 1010 bp, Homo sapiens
  misc feature (1007): n equals a,t,g, or c
  misc feature (1009): n equals a,t,g, or c
ggcagagccaggagcttggggaagggtgaggcctgcccgccgcgaagagggggtgatctcggcgacccccggcggcatgttcgaggctgctccgggagcccagccgcccgggagcgccccaccggcggggaacgggtcggagctgcagtgggacgcgggggcggtgggatacggggggtctcgacacctctctgggccgtaatcgccttcgcttctccccggaagggaagcgcgcccccggggccggtcccggaggctcgatccgcatctacagcatgaggttctgcccgtttgctgagaggacgcgtctagtcctgaaggccaagggaatcaggcatgaagtcatcaatatcaacctgaaaaataagcctgagtggttctttaagaaaaatccctttggtctggtgccagttctggaaaacagtcagggtcagctgatctacgagtctgccatcacctgtgagtacctggatgaagcatacccagggaagaagctgttgccggatgacccctatgagaaagcttgccagaagatgatcttagagttgttttctaaggtgccatccttggtaggaagctttattagaagccaaaataaagaagactatgctggcctaaaagaagaatttcgtaaagaatttaccaagctagaggaggttctgactaataagaagacgaccttctttggtggcaattctatctctatgattgattacctcatctggccctggtttgaacggctggaagcaatgaagttaaatgagtgtgtagaccacactccaaaactgaaactgtggatggcagccatgaaggaagatcccacagtctcagccctgcttactagtgagaaagactggcaaggtttcctagagctctacttacagaacagccctgaggcctgtgactatgggctctgaagggggcaggagtcagcaataaagctatgtctgatattttccttcactaaaaaaaaaaaaaaaaaaaaaaaaaaraaaaaaaaaaaaaancnc

SEQ ID NO: 211 - DNA, 1548 bp, Homo sapiens
  misc feature (1513): n equals a,t,g, or c
  misc feature (1522): n equals a,t,g, or c
  misc feature (1529): n equals a,t,g, or c
  misc feature (1547): n equals a,t,g, or c
cttcaaccccaaaggaggcactctggtctggcaggacaacamagctgtgaaytactccaactgggggcccccgggcttgggccccagcatgctgagccacaacagctgctactggattcagagcaacagcgggctatggcgccccggcgcttgcaccaacatcaccatgggtgtcgtctgcaagcttcctcgtgctgagcagagcagcttctccccatcagcgcttccagagaacccagcggccctggtggtggtgctgatggcggtgctgctgctcctggccttgctgaccgcagccctcatcctttaccggaggcgccagagcatcgagcgcggggcctttgagggtgcccgctacagccgcagcagctccagccccaccgaggccactgagaagaacatcctggtgtcagacatggaaatgaatgagcaacaagaatagagccaggcgcgtgggcagggccagggcgggaggagctggggagctggggccctgggtcagtctggccccccaccagctgcctgtccagttggcctatggaagggtgcccttgggagtcgctgttgggagccggagctgggcagagcctgggctggtggggtgccaccctcccacaagggctgggctgagacccagctgagtgcagcgtggcgtttccctttctgggggggcctgaggtcttgtcacctggtcctgtgcccccacaggaaccagaggtaggatgggagggggaacgagagcctctttctccccagagcccccggcccaggcctgttgatccgcgccccaggacccccttctttgcagagcccgaggagcctcccctgtcccctcgggcagatctgttgtgtctctcttcccacctggcagcctcagctctgtgcccctcaccctgctccctctcgccccttctctcccaccccttccttctgagccgggccctggggattggggagccctcttgttcctgatgagggtcagctgagggggctgagcatccatcactcctgtgcctgctggggtggctgtggggcgtggcaggaggggcctaggtgggttgggcctgagaaccagggcacgggtgtggtgtctgctgggctggagataagactggggagagacaccccaacctcccagggtgggagctgggccgggctgggatgtcatctcctgccgggcgggggagggctctgcccctggaagagtcccctgtggggaccaaaataagttccctaacatctccagctcctggctctggtttggagcaaggggaagggttgccagagtcctgggggccccagaggagcaggagtctgggarggcccagagttcacccttccaagaggccacagtcccagccaggacaaagkatgcggcccatcctggtgcracasgtgggacaatgtgaacatggactcgaagacatggccctttctctgtagttgattttttaaatgtgccattattgtttttaaaaaaaaaaggaaaaaggaaaagcaaccatttaaaacncttttaagngggtttnaaagggaaaaaaaaaaana

SEQ ID NO: 212 - DNA, 1529 bp, Homo sapiens
ggccacccctcgcgcccaccgccaccgccgggaccctggcggccagcgagggcagatggaagagtatgaggaagagccctctcgggggtggtggcggctcgggagcctccagtcaggccgcctgcctcaaacagatccttctgctgcaattggacctcatcgaacagcagcagcagcagctgcaggccaaggaaaaggagatcgaggagctgaagtcagagagagacacgctccttgctcggattgaacgtatggaaaggcggatgcagctggtaaagaaggataacgagaaagaaaggcacaagctgtttcagggctatgaaactgaagagagagaggaaacagagctatctgagaaaattaaactggagtgccagccggagctttccgagacatcccagactctgcctcccaagcccttctcatgtgggcggagtggaaagggacataaaaggaaatccccatttggaagtacagaaagaaagactcctgttaaaaagctggctcctgaattttcaaaagtcaaaacaaaaactcctaagcactctcctattaaagaggaaccctgtggttccttatctgaaactgtttgtaaacgtgaattgaggagccaagaaaccccagaaaagccccggtcttcagtggacaccccaccaagactctccactccccaaaagggacccagcacccatcccaaggagaaagccttctcaagtgagatagaagatttgccgtacctttccaccacagaaatgtatttgtgtcgttggcaccagcctcccccatcaccgttaccattacgggaatcctctccaaagaaggaggagactgtagcaagtaaggcatagagaacacttgctcttataccctagtggtggcggtcaagctaacaagtgtgaaaatgcctttggcatttttaaaaaagtgcaatcaataaagcagagttctgtcaagaatgagtaagttaacagccagagacagacactgtgcaggcattgcaaatagatggaattacagcaaaatgtgctcaatgtatttgcctgcttacaacactgggagatgtgtttgccagtaagttgctcatcacaagagcaccagacttgggggtgtaatctccggcaacttgcatgccctctgaaagaagggttttctgtgctgtgaaatgcatagaactatactttgccatgcacgactgttcctgcaattgatattgtgtgaaatctgggagggtggtctttgggtgttctcaggggccaatggtaatttttgggttggggagccagcttggggtggggaattttcacctgggcctccgctctttaactatataaacatttatctgtatatctatgtccctgtctggggggcaggaggaatctgccaaagaccaacagtcttactttatcttactatacttcacaaaggttctaaaatgtgaagagtttacttggattgcagtagcccattggttgttcatatatttaaataaaatggtctacaaactaaaamaawaaaaaaaaaaaaaaaaa

SEQ ID NO: 213 - DNA, 2575 bp, Homo sapiens
ctgaaaagaagctgagttgtctccaggctgctgtcactgcatccaggactctgtcagctctgctgcccacatgcacccctggcctcagcatcccggttcccccagacaagagagggcaagtcagccaggaactgcctcctccctgctctacagctaagaaaacaccattccatgacttcccaccgcgccctcgctcctacctccccacacctctctctgagtccccaggaacacacagaggtgcacatcacattcccttgtccacactgcccgcctctcccacatgccacccccttccctgtccttccccaactccccagctccaagagtggaagaaatccccaagatcatctgggtctccctctccacacccagaactgaggcttggatatcttcttcaacatccttgccaagacttctccaccctcttgcatacctccagggacagagagcttactacctcccaaggcagcctcctgcctttggactgctctgactttagcatcagcttaatacacagaagaggtttctgtttttctgtggctctgtccatggsatcccacttgcccactctccttcctggagtgttgaggtcacacattgactcccctgagccctcttctctccaggctaaagaatcccgaaggcatcgaggccatttctgctgcaacaaggtttcctgtctcttcactgtccgcacatttcttagtattccctccaggcttgggcagggagactcgcagatgcacacccacaagtattcagttctcaaactctagacgagtgttggcaactggattgcaagatgctcctaccctgatagatcaggggtggctgctggaggctgtgctggggatctgaggtttggtctgggctcagtgggagayggcagtgcaatcctgatgagtgatgtctgccaggcaccgtaagtttgattagtgatgtctgccacgggcagggatggaaggagcagtgtgatgtctgctctcttctctcccctctgtccctcttcaggaagaaagagctcattctgtctcacaagccaccggcatcctgtatcagcttccagcctcccctcaggctttccagtcaccagggacactcggagccacagcctagagccccgtgttccctggcctgtgcgtctgcccccttctgagatgcagccagaagctctgtgcctgctgcaaagattcaggtggaccctcctctaatctcctcctgctgtgcccgccagtccttgccctcccaccaggtctctgagctcagtsttaccaaattcgccctttaacagcttgctctggcaaccccataaatgacacctgagstccgtagaagctaagctcctgagacccagggggacctgccactggtaccgcggcccagcctggggcctgggggctgcccctcttgaaccacccacatgcttagccccagctttttggaagaggcaaatggctggtctgaggatgacacacaaaaacaaaaacaaaaaacaaaaaacccatgctgggcaggactgaggcaaattgcacagctttatggctctaatccaggggcatcccaggcttctggggcccacagaagtcagagggaggacccaagagaaagggctggtcatgaagggaaatctggctaaggtgggttcaagggcagacacaagactgcccctcagcagctttctacaaatgtgccaaggaaccctcaatcagccctgattcagctcgccagccagccactggccaccctcttaggctggaaagggaagacaggcagtttctgctcctgttggcattcgctcaggctggtagctatttgcaagactgcctgaggccattccttggaggcaaggcaaagaaagctcagcccaaatcaggcttgagcctccctccagagcacagggagaaacagggtttagctggcttggtccagatacaacccacagcaggttctggtggtggctggggttgtgggggaggggtgggcagggatacctctttgtttcttttcaccccgaaatacaacagcccataacagagacttcctcggaccccactaacagggcaaggaacaagaagactacaccgctcatcacaaaccctgcctgtatcgaaagccactttcctgctctgaagctactgcctcttagagaaagggaatagctctttatgggctgggggtgagggcccctccccagggtccctgttaatttctggccttggtgctcaggcctgtccacagcctcccttgtctatgtctctatccatgcttaaggggcccggacaggatttcccaaaccagccgaggccccagcacccgccgtctccccagaagccccctcctccttcccccatgggtcatatgttgaaagtctattttaaaaactatgttccttgccgtagattgcagagctaatttatcacgtttctctcctgtgagaccccccttttatatgatatatccagaggaagttttgtaatataaaacaggacgcccacactgatggttttgcactggtttttgtgaatgtttcttacaaaaagaaaaaggaacaaagaataaatagtgaccgtga

SEQ ID NO: 214 - DNA, 2040 bp, Homo sapiens
cacgaggagaacagaagaagagaaagctcagcaaattttcttgccatacttcatgacttcactgtggctaagtgtggggaccagacaggactcgtggagacatccaggtgctgaagccttcagctactgtctcagttttttgaagtttagcaatggcgtctttctctgctgagaccaattcaactgacctactctcacagccatggaatgagcccccagtaattctctccatggtcattctcagccttacttttttactgggattgccaggcaatgggctggtgctgtgggtggctggcctgaagatgcagcggacagtgaacacaatttggttcctccacctcaccttggcggacctcctctgctgcctctccttgcccttctcgctggctcacttggctctccagggacagtggccctacggcaggttcctatgcaagctcatcccctccatcattgtcctcaacatgtttgccagtgtcttcctgcttactgccattagcctggatcgctgtcttgtggtattcaagccaatctggtgtcagaatcatcgcaatgtagggatggcctgctctawctgtggatgtatctgggtggtggcttgtgtgatgtgcattcctgtgttcgtgtaccgggaaatcttcactacagacaaccataatagatgtggctacaaatttggtctctccagctcattagattatccagacttttatggagatccactagaaaacaggtctcttgaaaacattgttcagccgcctggagaaatgaatgataggttagatccttcctctttccaaacaaatgatcatccttggacagtccccactgtcttccaacctcaaacatttcaaagaccttctgcagattcactccctaggggttctgctaggttaacaagtcaaaatctgtattctaatgtatttaaacctgctgatgtggtctcacctaaaatccccagtgggtttcctattgaagatcacgaaaccagcccactggataactctgatgcttttctctctactcatttaaagctgttccctagcgcttctagcaattccttctacgagtctgagctaccacaaggtttccaggattattacaatttaggccaattcacagatgacgatcaagtgccaacacccctcgtggcaataacgatcactaggctagtggtgggtttcctgctgccctctgttatcatgatagcctgttacagcttcattgtcttccgaatgcaaaggggccgcttcgccaagtctcagagcaaaacctttcgagtggccgtggtggtggtggctgtctttcttgtctgctggactccataccacatttttggagtcctgtcattgcttactgacccagaaactcccttggggaaaactctgatgtcctgggatcatgtatgcattgctctagcatctgccaatagttgctttaatcccttcctttatgccctcttggggaaagattttaggaagaaagcaaggcagtccattcagggaattctggaggcagccttcagtgaggagctcacacgttccacccactgtccctcaaacaatgtcatttcagaaagaaatagtacaactgtgtgaaaatgtggagcagccaacaagcaggggctcttaggcaatcacatagtgaaagtttataagaggatgaagtgatatggtgagcagcggacttcaaaaactgtcaaagaatcaatccagcggttctcaaacggtacacagactattgacatcagcatcacctagaaacttgttagaaatgcaaattctcaagccgcatcccagacttgctgaatcggaatctctgggggttgggacccagcaagggcacttaacaaaccctcgtttctgattaatgctaaatgtaagaatcattgtaaacattagttctatttctatcccaaactaagctatgtgaaataagagaagctactttgtttttaaatgatgttgaatatttgtcgatatttccatcattaaatttttccttagcattgtctaagtcaaaaaaaaaaaaaaaaaa

SEQ ID NO: 215 - DNA, 324 bp, Homo sapiens
  misc feature (268): n equals a,t,g, or c
  misc feature (284): n equals a,t,g, or c
  misc feature (304): n equals a,t,g, or c
aattcggcacgagttttgataagaattgtactgataatagcaaagatatgtaatcaacccaaacgcccaacctaactgctatgttattcctattccaatactttgcaatatatgtagctttttagaaagaggatatgttagcagggcgcagtggctcacacctgtaatcccagcactttgggaggctgaggcaggtggattgcctgaggtcaggagttagagaccagcctggacaacatggtgaaacccgtgtctgctaaaagtacanaaattagcagggggtngtggcaggcacctgtaaatnccagctacttcagggaggct

SEQ ID NO: 216 - DNA, 1475 bp, Homo sapiens
tccacagagcgggacttcttcatgaggatgaagtgcacggtcaccaacagaggccgtactgtcaacctcaagtcagccacctggaaggtcttgcactgcacgggccaggtgaaagtctacaacaactgccctcctcacaatagtctgtgtggctacaaggagcccctgctgtcctgcctcatcatcatgtgtgaaccaatccagcacccatcccacatggacatccccctggatagcaagaccttcctgagccgycacagcatggacatgaagttcacctactgtgatgacagaatcacagaactgattggttaccaccctgaggagctgcttggccgctcagcctatgaattctaccatgcgctagactccgagaacatgaccaagagtcaccagaacttgtgcaccaagggtcaggtagtaagtggccagtaccggatgctcgcaaagcatgggggctacgtgtggctggagacccaggggacggtcatctacaaccctcgcaacctgcagccccagtgcatcatgtgtgtcaaytacgtcctgagtgagattkagaagaatgacgtggtgttctccatggaccagactgaatccctgttcaagccccacctgatggccatgaacagcatctttgatagcagtggcaagggggctgtgtctgagaagagtaacttcctattcaccaagctaaaggaggagcccgaggagctggcccagctggctcccaccccaggagacgccatcatctctctggatttcgggaatcagaacttcraggagtcctcagcctatggcaaggccatcctgcccccgagccagccatgggccacggagttgaggagccacagcacccagagcgagctgggagcctgcctgccttcaccgtgccccaggcagctgccccgggcagcaccacccccagtgccaccagcagcagcagcagctgctccacgcccaatagccctgaagactattacacatctttggataacgacctgaagattgaagtgattgagaagctcttcgccatggacacagaggccaaggaccaatgcagtacccagacggatttcaatgagctggacttggagacactggcaccctatatccccatggacggggaagacttccagctaagccccatctgccccgaggagcggctcttggcggagaacccacagtccaccccccagcactgcttcagtgccatgacaaacatcttccagccactgrcccctgtagccccgcacagtcccttcctcctggacaagtttcagcagcagctggagagcaagaagacagagcccgagcaccggcccatgtcctccatcttctttgatgccggaagcaaagcatccctgccaccgtgctgtggccaggccagcacccctctctcttccatggggggcagatccaatacccagtggcccccagatccaccattacattttgggcccacaaagtggcgtcgg

SEQ ID NO: 217 - DNA, 1387 bp, Homo sapiens
aacaagcggaagctgagcaccggcatcgccctgatcggagagcctgctgtcatcttcctggacgagccgtcactggcatggaccccgtggcccggcgcctgctttgggacaccgtggcacgagcccgagagtctggcaaggccatcatcatcacctcccacagcatggaggagtgtgaggccctgtgcacccggctggccatcatggtgcaggggcagttcaagtgcctgggcagcccccagcacctcaagagcaagttcggcagcggctactccctgcgggccaaggtgcagagtgaagggcaacaggaggcgctggaggagttcaaggccttcgtggacctgacctttccaggcagcgtcctggaagatgagcaccaaggcatggtccattaccacctgccgggccgtgacctcagctgggcgaaggttttcggtattctggagaaagccaaggaaaagtacggcgtggacgactactccgtgagccagatctcgctggaacaggtcttcctgagcttcgcccacctgcagccgcccaccgcagaggaggggcgatgaggggtggcggctgtctcgccatcaggcagggacaggacgggcaagcagggcccatcttacatcctctctctccaagtttatctcatcctttatttttaatcacttttttctatgatggatatgaaaaattcaaggcagtatgcacagaatggacgagtgcagcccagccctcatgcccaggatcagcatgcgcatctccatgtctgcatactctggagttcactttcccagagctggggcaggccgggcagtctgcgggcaagctccggggtctctgggtggagagctgacccaggaagggctgcagctgagctgggggttgaatttctccaggcactccctggagagaggacccagtgacttgtccaagtttacacacgacactaatctcccctggggaggaagcgggaagccagccaggttgaactgtagcgaggcccccaggcgccaggaatggaccatgcagatcactgtcagtggagggaagctgctgactgtgattaggtgctggggtcttagcgtccagcgcagcccgggggcatcctggaggctctgctccttagggcatggtagtcaccgcgaagccgggcaccgtcccacagcatctcctagaagcagccggcacaggagggaaggtggccaggctcgaagcagtctctgtttccagcactgcaccctcaggaagtcgcccgccccaggacacgcagggaccaccctaagggctgggtggctgtctcaaggacacattgaatacgttgtgaccatccagaaaataaatgctgaggggacacagaaaaaaaaaaaaaaaaaaaaaaaaaaaaaaaaaa

SEQ ID NO: 218 - DNA, 1833 bp, Homo sapiens
ggcagagcgccgaaggaggcggaaggagcagaggaccggcagccggcgtcgaggcggggcgcgggaacgacggcggccatggcggcctcggggcccgggtgtcgcagctggtgcttgtgtcccgaggtgccatccgccaccttcttcactgcgctgctctcgctgctggtttccgggcctcgcctgttcctgctgcagcagcccctggcgccctcgggcctcacgctgaagtccgaggcccttcgcaactggcaagtttacaggctggtaacctacatctttgtctacgagaatcccatctccctgctctgcggcgctatcatcatctggcgctttgctggcaatttcgagagaaccgtgggcaccgtccgccactgcttcttcaccgtgatcttcgccatcttctccgctatcatcttcctgtcattcgaggctgtgtcatcactgtcaaagctgggggaagtggaggatgccagaggtttcaccccagtggcctttgccatgctgggagtcaccaccgtccgttctcggatgaggcgggccctggtgtttggcatggttgtgccctcagtcctggttccgtggctcctgctgggtgcctcgtggctcattccccagacctctttcctcagtaatgtctgcgggctgtccatcgggctggcctatggctgcacctactgctattccatcgacctctcagagcgagtggcgctgaagctcgatcagaccttccccttcagcctgatgaggaggatatccgtgttcaagtacgtctcagggtcttcagccgagaggagggcagcccagagccggaaactgaacccggtgcctggctcctaccccacacagagctgccaccctcacctgtccccaagccaccctgtgtcccagacgcagcacgccagtggtcagaagctggcctcctggccctcctgcacccccgggcacatgcccaccttgcctccgtaccagcctgcctccggcctgtgctatgtgcagaaccactttggtccaaaccccacctcctccagtgtctacccagcttctgcgggcacctccctgggcatccagccccccacgcctgtgaacagccctggcacggtgtattctggggccttgggcacaccaggggctgcaggctccaaggagtcctccagggtccccatgccctgagagaatttctagggaagtcatctcacttggccttctgaaggtcctccctaagagtctcctgacaaaagttacttattgaacacctctatgtgccaggctctgtgttgggtactttgatcaatgcccctgtttcagtctcatctgtactcacggcagccctgtggagtacggtgtactggcccagcttacagatgcagaaagcgagacgttctgccatcagataaagtcacgtggctctttagtaacacggacaaggctcctcgccaaggaactcgtggcagaagagggcagcagttggcagtagctgccgatgtctgtccccagctccaccattcctccctgtggctgtgccgtgctcgtggtttcagtgtccgtgtgtccatgtgtctgcccttcaggagctcgcagctggtgtgcttggcggtcccaggcctgtgtagtgtctctcccctgctgcgggcgcccccaccccgattcctctccccagaagcggtgggatgggcccccatgaactgcagcagcatgctgaggtgtccatgttgtctgcctttgtataaagaaacagcctctgaccaaaaaaaaaaaaaaaaaaagggcggccgctctagaggatccctcgaggggcccaagcttacgcgtgcatgcgacgtcatagctctc

SEQ ID NO: 219 - DNA, 2592 bp, Homo sapiens
ggagttatattgcggggtccttcctcgctcaccctggttcctctcggagcggagacggcaaatggcggacttcgacacctacgacgatcgggcctacagcagcttcggcggcggcagagggtcccgcggcagtgctggtggccatggttcccgtagccagaaggagttgcccacagagcccccctacacagcatacgtaggaaatctacctttcaatacggttcagggcgacatagatgctatctttaaggatctcagcataaggagtgtacggctagtcagagacaaagacacagataaatttaaaggattctgctatgtagaattcgatgaagtggattcccttaaggaagccttgacatacgatggtgcactgttgggcgatcggtcacttcgtgtggacattgcagaaggcagaaaacaagataaaggtggctttggattcagaaaaggtggaccagatgacagaggcttcagggatgacttcttagggggcaggggaggtagtcgcccaggcgaccggcgaacaggcccccccatgggcagccgcttcagagatggccctcccctccgtggatccaacatggatttcagagaacccacagaagaggaaagagcacagagaccacgactccagcttaaacctcgaacagtcgcgacgcccctcaatcaagtagccaatcccaactctgctatcttcgggggtgccaggcctagagaggaagtcgttcaaaaggagcaagaatgagcctgcggttgggagggaatggggcgtggggggttagagcaggaccacagcctggtgagtccccgggcagccgtcctgcagccgccactcctgcgcctgccattggcctcctcacagcggaaacacagcttgtgagtgcatgtcagctgttaacaagtggtttttagtacattctgggctttgctgtatctatctagtgcctgtttgtgcgtttttttctttcttccgctgcttccccattttccttctgtcctttttctcctgctccttgttttcccagcagcacatggggttcctcggaggagcagaggtggccgccgtgggggggcgtttgggctgcggtgctgcgtcatttttcctttgctttctctttactttagacactggcccaactccaggcgtttcctttcattccctcagtgcttctcttctgacctgcatgttgagttctgtattgctggggcttccaacaaaaaccagagtcactgacagagggaacagcagagaccttgttggtattcagctgtgatggatatagagaatcagaggcaccttgttttcacaactaggataaaaatatctgcagggtcctttccattcctatttagagggagtcctggctccatgaccccctcccgagtggactgtccaagcagataggctcacacgagaaacagtgaggctgaaagggggggctatggaagagcggtagggagtccacggagaagatgcagtgaatgcttgcatgcattcacacgtgtgtgtgtcccagctagttcactcctttcgccgtgcgtggtggaggctggcctctctggctgggtgcagtgaatggccagcgggtttcttttctgctgggccaaggcgctttgggggtggagggggtggtgctggtgctgcactgggctgactgcggcgctgacgcagcgtttccccccatccctgttgcctgtgtgttgtgtggatctgttcctagtataggcaacataatgagatactgtgcttcccacctccccttcagttcagagccaaaatgggtctagaatctggcactttactcatttcctttgataaattgtactatgcagagctgtcaggaaccttcagatagcagtagaggactgcagctgtctaggtctgcggccacatcttggggacacactggactgttcccatgtgcagggttcagcagttatgtgggagtgctaggggttaggcttttgagcttgaacgcctgcgtgtgaacagatgaaaaatccttcagtacccaagtcccagtctgtcctatggggagcagtttgggggcggccggcagcaggagcctgggaaagaggccctcgccaggtgatggcagggccagggtggcctggggcacccagcggaatgtgcttagtatttggtcaccagccgtcatcctgggcttttcctactgtgtcttgttacaaggcctcagcaatccacagaactctctctccttccttccacctgtcagcttctctgcttctgagataagaaccatttgtgtaacaccaacacttaacttcagaaagacatgcattatgtggtgtaatcaaacccgatgctttcagatgacctacttacatcttcaatgtggataagataaagaacaaaacacatgcatctaaactgctgggcaatccagttgacttttaaatgtaagaatggaattccaaacacttaacacattcagctatatgacagaaagtaaatctatggatatggtattttgtgaatgatcttttaaataaaagaaaaccttacgtaataaaaaaaaaaaaaaaagggsggccgctctagaggatccaagcttacgtacggggtgc

SEQ ID NO: 220 - DNA, 2404 bp, Homo sapiens
  misc feature (2399): n equals a,t,g, or c
  misc feature (2403): n equals a,t,g, or c
  misc feature (2404): n equals a,t,g, or c
aaaaggaggaagaaatcgtggactggtggagtaaattttatgcttcctcaggggaacatgaaaaatgcggacagtatattcagaaaggctattccaagctcaagatatataattgtgaactagaaaatgtagcagaatttgagggcctgacagacttctcagatacgttcaagttgtaccgaggcaagtcggatgaaaatgaagatccttctgtggttggagagtttaagggctcctttcggatctaccctctgccggatgaccccagcgtgccagcccctcccagacagtttcgggaattacctgacagcgtcccacaggaatgcacggttaggatttacattgttcgaggcttagagctccagccccaggacaacaatggcctgtgtgacccttacataaaaataacactgggcaaaaaagtcattgaagaccgagatcactacattcccaacactctcaacccagtctttggcaggatgtacgaactgagctgctacttacctcaagaaaaagacctgaaaatttctgtctatgattatgacacctttacccgggatgaaaaagtaggagaaacaattattgatctggaaaaccgattcctttcccgctttgggtcccactgcggcataccagaggagtactgtgtttctggagtcaatacctggcgagatcaactgagaccaacacagctgcttcaaaatgtcgccagattcaaaggcttcccacaacccatcctttccgaagatgggagtagaatcagatatggaggacgagactacagcttggatgaatttgaagccaacaaaatcctgcaccagcacctcggggcccctgaagagcggcttgctcttcacatcctcaggactcaggggctggtccctgagcacgtggaaacaaggactttgcacagcaccttccagcccaacatttcccagggaaaacttcagatgtgggtggatgttttccccaagagtttggggccaccaggccctcctttcaacatcacaccccggaaagccaagaaatactacctgcgtgtgatcatctggaacaccaaggacgttatcttggacgagaaaagcatcacaggagaggaaatgagtgacatctacgtcaaaggctggattcctggcaatgaagaaaacaaacagaaaacagatgtccattacagatctttggatggtgaagggaattttaactggcgatttgttttcccgtttgactaccttccagccgaacaactctgtatcgttgcgaaaaaagagcatttctggagtattgaccaaacggaatttcgaatcccacccaggctgatcattcagatatgggacaatgacaagttttctctggatgactacttgggtttcctagaacttgacttgcgtcacacgatcattcctgcaaaatcaccagagaaatgcaggttggacatgattccggacctcaaagccatgaacccccttaaagccaagacagcctccctctttgagcagaagtccatgaaaggatggtggccatgctacgcagagaaagatggcgcccgcgtaatggctgggaaagtggagatgacattggaaatcctcaacgagaaggaggccgacgagaggccagccgggaaggggcgggacgaacccaacatgaaccccaagctggacttaccaaatcgaccagaaacctccttcctctggttcaccaacccatgcaagaccatgaagttcatcgtgtggcgccgctttaagtgggtcatcatcggcttgctgttcctgcttatcctgctgctcttcgtggccgtgctcctctactctttgccgaactatttgtcaatgaagattgtaaagccaaatgtgtaacaaaggcaaaggcttcatttcaagagtcatccagcaatgagagaatcctgcctctgtagaccaacatccagtgtgattttgtgtctgagaccacaccccagtagcaggttacgccatgtcaccgagccccattgattcccagagggtcttagtcctggaaagtcaggccaacaagcaacgtttgcatcatgttatctcttaagtattaaaagttttattttctaaagtttaaatcatgtttttcaaaatatttttcaaggtggctggttccatttaaaaatcatctttttatatgtgtcttcggttctagacttcagcttttggaaattgctaaatagaattcaaaaatctctgcatcctgaggtgatatacttcatatttgtaatcaactgaaagagctgtgcattataaaatcagttagaatagttagaacaattcttatttatgcccacaaccattgctatattttgtatggatgtcataaaagtctatttaacctctgtaatgaaactaaataaaaatgtttcacctttaaaaaaaaaacanactnn

SEQ ID NO: 221 - DNA, 2670 bp, Homo sapiens
  misc feature (38): n equals a,t,g, or c
acaactgaatacaccagagtacttattcggaggcwtgnmagscagacagagatgaaaagacagtcaaaggacggaagtggaaggacgggagtgagctggggagctgttgatctttcactatacaggctgggaagtgtgttgatgaccactgagccaggcttttctcaggagcttcaatgagtatggccgacagacatggacaaggagctgtgttcaccatcggactcatgtgcagtcagcttttttcctgttggtttcatttgaataatcagatgctggtgttgagaccaagtatgattgacataatcattcatttcgacccctcctgcccctctctctctctctcctctcccctttgtggattctttttggaaactgagcgaaatccaagatgctggcaccaagcgtattccgtgtggccctttggatggacatgctacctgaaacccagtgcccagaatatactagaatcaccgcatttcagtggactcctgaagttgtacttgtgtataattgcccgcgtcgtgcataggcaaagaaggattaggctgttttctttttaaagtactgtagcctcagtactggtgtagtgtgtcagctctgtttacgaagcaatactgtccagttttcttgctgtttttccggtgttgtactaaacctcgtgcttgtgaactccatacagaaaacggtgccatccctgaacacggctggccactgggtatactgctgacaaccgcaacaacaaaaacacaaatccttggcactggctagtctatgtcctctcaagtgcctttttgtttgtactggttcattgtgttacattaacgacccactctgcttcttgctggtgaaagccctgctctttaatcaaacyctggtggcccactgactaagaagaaagtttattttcgtgtgagaygccagcccctccgggcaggcaagggctctgaagatttggcaacgtggcttaattgttctgctttttctgtagttcaatttcatgtttcttgacccttttgtataaagctacaatattctctcttattgttctttcatatggaatgtattttcaaatgtaaactctcttctctttctctctcctatctctctgtcttttttctctcttagaattggaggatttgccattgtccaggaaagaaacttgcagctttaacctgctgggaatggcaaacgattttactagactttatgtttaaaaataaataaataagggaaattcctaactttgccctccaaagtctaactttggttttcttgttaactggttaaagtgacagtatcttttttccttatctattctattcaaaatgacctttgatagaaatgttggcatttagtagaaatagtgataagttgaggaaagaaataatayaaattggctttcaagtgagacccaaaggaagaactggataaaatcttccaaatccaaaagcatgagatttttctatccaaatatgcaaaaatgacccaagagaactttcttattttgctactgagtcacacaagggaagtggaaggaagaacagttaatttaagaatgaaactataaatcctgatgcctgggggtcaagtattttaagataagagggggaaaaacacataaagtcaaacaaatgttttaaaaattcataacagcaaccttgaaaaaatagacttaaatgaatgcttctagaaacttccagcggctcacaaagaataagmctgccttagggctggcaacatctaagcctctaacagcacagggaagcaaatatcttaccaggcagcctatgaattaacccaaagaagctttggttggttttggtggatttttatcatgccatgttggacatgagattttttagatcttccttcccacattgctagacgtctcactcaaagacatttgttgggagtcacatttgcatcatagatgagacagtccattcatcttagttaaattggattgagaatgccttttgtttccaggaaaatattgatcaccatgaaagaagaatagttttttgtccccagagacattcatttagttgatataatcctaccagaaggaaagcactaagaaacactcgtttgttgtttttaaaggcaacagacttaaagttgtcctcagccaaggaaaaatgatactgcaactttaaaatttaaagtatcttgcactgataaatatatttaaaaattatatgtttataaagttattaatttgtaaaggcagtgttacaaaatgttcagtttatattgttttagattgttttgtaatttttaaaggtgtaaaataacatattttttctttatggaaatctataaaactttctgtagtaaaatgttttcattttactggtatattattgcttcatgttttgtaccatcataagattttgtgcagattttttttacagaaattattattttctatgacaatatgacacttgtaaattgttgtttcaaaatgaacagcgaagccttaactttaaatgacatttgtattctcagacactgagtagcataaaaaccacatagaactgaactgtaacttaaattccaaactatgactactacattccaaagaaacagttgaattaaacattttcataaaataaaaaaaaaaaaaaaaaagggcggccgctctagaggatcccgcgaggggcccaa

SEQ ID NO: 222 - DNA, 1756 bp, Homo sapiens
  misc feature (13): n equals a,t,g, or c
  misc feature (26): n equals a,t,g, or c
  misc feature (33): n equals a,t,g, or c
  misc feature (37): n equals a,t,g, or c
  misc feature (52): n equals a,t,g, or c
  misc feature (1714): n equals a,t,g, or c
  misc feature (1742): n equals a,t,g, or c
tgtaagtacgacntcacgtagtaggngaaagcntggntacgccgtgctaggntacctggctcsggaattcccgggtcgacccacgcgtccggtggccagggatcaggcagcggctcaggcgaccctgagtgtgcccccaccccgccatggcccggctgctgcaggcgtcctgcctgctttccctgctcctggccggcttcgtctcgcagagccggggacaagagaagtcgaagatggactgccatggtggcataagtggcaccatttacgagtacggagccctcaccattgatggggaggagtacatccccttcaagcagtatgctggcaaatacgtcctctttgtcaacgtggccagctactgaggcctgacgggccagtacattgaactgaatgcactacaggaagagcttgcaccattcggtctggtcattctgggctttccctgcaaccaatttggaaaacaggaaccaggagagaactcagagatccttcctaccctcaagtatgtccgaccaggtggaggctttgtccctaatttccagctctttgagaaaggggatgtcaatggagagaaagagcagaaattctacactttcctaaagaactcctgtcctcccacctcggagctcctgggtacatctgaccgcctcttctgggaacccatgaaggttcacgacatccgctggaactttgagaagttcctggtggggccagatggtatacccatcatgcgctggcaccaccggaccacggtcagcaacgtcaagatggacatcctgtcctacatgaggcggcaggcagccctgggggtcaagaggaagtaactgaaggccgtctcatcccatgtccaccatgtaggggagggactttgttcaggaagaaatccgtgtctccaaccacactatctacccatcacagacccctttcctatcactcaaggccccagcctggcacaaatggatgcatacagttctgtgtactgccaggcatgtgggtgtgggtgcatgtgggtgtttacacacatgcctacaggtatgcgtgattgtgtgtgtgtgcatgggtgtacagccacgtgtctacctatgtgtctttctgggaatgtgtaccatctgtgtgcctgcagctgtgtagtgctggacagtgacaaccctttctctccagttctccactccaatgataatagttcacttacacctaaacccaaaggaaaaaccagctctaggtccaattgttctgctctaactgatacctcaaccttggggccagcatctcccactgcctccaaatattagtaactatgactgacgtccccagaagtttctgggtctaccacactccccaaccccccactcctacttcctgaagggccctcccaaggctacatccccaccccacagttctccctgagagagatcaacctccctgagatcaaccaaggcagatgtgacagcaagggccacggaccccatggcaggggtggcgtcttcatgagggaggggcccaaagcccttgtgggcggacctcccctgagcctgtctgaggggccagcccttagtgcattcaggctaaggcccctgggcagggatgccacccctgstccttcggaggacgtgccctcacccctcactggtccactggcttgagactcaccccgtctgcccagtaaaagcctttctgcagcaaaaaaaaaaaaaaaaaaaaaagggggggncccgtacccatttsgccctaaaaggggnccgtattaaaatta

SEQ ID NO: 223 - DNA, 2379 bp, Homo sapiens
acccacgcgtccgctagccctgcccggccccggaggacttgcaacactccgaggccaggaacgctccgtctggaacggcgcaggtcccagcagctggggttccccctcagcccgtgagcrgccatgtccaaccccagcgccccaccaccatatgaagaccgcaaccccctgtacccaggccctcygccccctgggggctatgggcagccatctgtcctgccaggagggtatcctgcctaccctggctacccgcagcctggctacggtcaccctgctggctacccacagcccatgccccccacccacccgatgcccatgaactacggcccaggccatggctatgatggggaggagagagcggtgagtgatagcttcgggcctggagagtgggatgaccggaaagtgcgacacacttttatccgaaaggtttactccatcatctccgtgcagctgctcatcactgtggccatcattgctatcttcacctttgtggaacctgtcagcgcctttgtraggagaaatgtggctgtctactacgtgtcctatgctgtcttcgttgtcacctacctgatccttgcctgctgccagggacccagacgccgtttcccatggaacatcattctgctgaccctttttacttttgccatgggcttcatgacgggcaccatttccagtatgtaccaaaccaaagccgtcatcattgcaatgatcatcactgcggtggtatccatttcagtcaccatcttctgctttcagaccaaggtggacttcacctcgtgcacaggcctcttctgtgtcctgggaattgtgctcctggtgactgggattgtcactagcattgtgctctacttccaatacgtttactggctccacatgctctatgctgctctgggggccatttgtttcaccctgttcctggcttacgacacacagctggtcctggggaaccggaagcacaccatcagccccgaggactacatcactggcgccctgcagatttacacagacatcatctacatcttcacctttgtgctgcagctgatgggggatcgcaattaaggagcaagcccccattttcacccgatcctgggctctcccttccaagctagagggctgggccctatgactgtggtctgggctttaggcccctttccttccccttgagtaacatgcccagtttcctttctgtcctggagacaggtggcctctctggctatggatgtgtgggtacttggtggggacggaggagctagggactaactgttgctcttggtgggcttggcagggactaggctgaagatgtgtcttctccccgccacctactgtatgacaccacattcttcctaacagctggggttgtgaggaatatgaaaagagcctattcgatagctagaagggaatatgaaaggtagaagtgacttcaaggtcacgaggttcccctcccacctctgtcacaggcttcttgactacgtagttggagctatttcttcccccagcaaagccagagagctttgtccccggcctcctggacacataggccattatcctgtattcctttggcttggcatcttttagctcaggaaggtagaagagatctgtgcccatgggtctccttgcttcaatcccttcttgtttcagtgacatatgtattgtttatctgggttagggatgggggacagataatagaacgagcaaagtaacctatacaggccagcatggaacagcatctcccctgggcttgctcctggcttgtgacgctataagacagagcaggccacatgtggccatctgctccccattcttgaaagctgctggggcctccttgcaggcttctggatctctggtcagagtgaactcttgcttcctgtattcaggcagctcagagcagaaagtaaggggcagagtcatacgtgtggccaggaagtagccagggtgaagagagactcggtgcgggcagggagaatgcctgggggtccctcacctggctagggagataccgaagcctactgtggtactgaagacttctgggttctttccttctgctaacccagggagggtcctaagaggaaggtgacttctctctgtttgtcttaagttgcactgggggatttctgacttgaggcccatctctccagccagccactgccttctttgtaatattaagtgccttgagctggaatggggaagggggacaagggtcagtctgtcgggtgggggcagaaatcaaatcagcccaaggatatagttaggattaattacttaatagagaaatcctaactatatcacacaaagggatacaactataaatgtaataaartttatgtctagaagttaaaaaaaaaaaaaaaaaaaaaaaaaaaaaaaaaaaaattctcggtc

SEQ ID NO: 224 - DNA, 2511 bp, Homo sapiens
gcggagggggtggaggtttgtctccgctgtttcatctctatggctgtcagaggtgggcggctttgaccgagaggctgctggagctcgtgtttggacgcgatgtttcgtctgaactcactttctgctttggcagaactggctgtgggttctcgatggtaccatggaggatcacagcccatccagatccggcgaagactaatgatggtggctttcctgggagcatctgcagtaactgcaagtactggtcttttgtggaagagggcccatgcagaatctccaccatgtgtagacaacctaaaaagtgacatcggtgataaagggaagaataaagatgaaggggatgtttgtaaccatgagaaaaagactgcagatcttgcccctcacccagaagagaaaaagaagaaacgttctggattcagagacagaaaagtgatggaatatgagaataggattcgagcctactccacgccagacaaaatcttccgatattttgccaccttgaaagtcatcagtgagcctggtgaagcagaagtgtttatgacaccagaagattttgtgcgatccataacacccaatgaaaaacaaccagaacacttgggtctggatcaatatataataaaacgctttgatggaaagaaaatttcccaggaacgagaaaaatttgctgatgaaggcagtatattttacacccttggagaatgtgggctcatatccttttcagactacattttcctcacaactgttctttccactcctcagagaaattttgaaattgccttcaagatgtttgatttgaatggagatggagaagtagatatggaagaatttgaacaggttcagagcatcattcgctcccaaaccagtatgggtatgcgccacagagatcgtccaactactggcaacaccctcaagtctggcttgtgttcagccctcacaacctacttttttggagctgatctgaagggaaagctgacaatcaaaaacttcctcgaatttcagcgtaaactgcagcatgatgttctgaagcttgagtttgaacgccatgaccctgtggatgggagaattactgagaggcagtttggtggcatgctacttgcctacagtggggtgcagtccaagaagctgaccgccatgcagaggcagctcaagaagcacttcaaagaaggaaagggtctgacatttcaggaggtggagaacttctttactttcctaaagaacattaatgatgtggacactgcattgagtttttaccatatggctggagcatctcttgataaagtgaccatgcagcaggtggccaggacagtggctaaagtggagctctcagaccacgtgtgtgatgtggtgtttgcactctttgactgtgatggcaatggcgaactgagcaataaggaatttgtttccatcatgaagcaacggctgatgagaggcctggaaaagcccaaagacatgggtttcactcgcctcatgcaggccatgtggaaatgtgcacaggaaactgcctgggacttcgctttacccaaacagtaaccccacactgcaagaggggacccctccacccccagtaccctggaccccctccgcagagtctcggcagagccctttgtgctgctgcttctggaagtagtcycccttcctcccgggatgacctcaggactctgtcggtttcccctctttacccttccccgtccccgtgttctgctgggctctgattctgcccaatgagtatccccataggttctcaaaaacatgaacaagtctgtaaagctcagacatttgtcagcctcaacagcaccacccattcaagcatcctgtggataaagaattcagggaaccatccacacacctgccaaccctgggaagcatccagttctcaaatcgtttttgctatggatttatactaacaagaacattccttgacttccctcctgctggtgttttaaagccacaagtagggaagatatctggcaggcagaaagaagtctgtgatgataaacaatgatgaggatgacctaggcaccctacgctagtgtgagaagcctgcgccccaggaaggatctgtgttagtccctgggatggctccaaggcctgctctaggaaggcagcatgctcagtgggaacacagcaagattcagaatttaaagtagttgcttcatggctctgtgcactcccttttcttcctcgcagcctccctaagatgactccagtgtgaccctgtgcttagtgagcaatagtgattgagctcatgttccctgcaagtgccatttcctctccaggatgggcctctaaagctgaggcctggctcagagcctgtttgccctctgtcttaaacaattgtaaatatcacttaaattataaccatttgcaataaacatccccaaagttaaaaaaaaaaaaaggagaggaggagggaggagagagagggagaagaagaaaaaaagggtctttaattaggcgggcccaagtttttcccttaggggggggtaattttacttggaatggccgccgttt

SEQ ID NO: 225 - DNA, 601 bp, Homo sapiens
ggtggcgtcggagccgagccggactggtcaggtcagaggcacgcaggggccgtcccacgggccagccccgccgtggccgtggccgtggctggcccgtggggcgaggacgggttcttgcgagggcgaggagtgcgccagcccgcagctcagcccctctcttctccgcaggatgatcacggacgtgcagctcgccatcttcgccaacatgctgggcgtgtcgctcttcttgcttgtcgttctctatcactacgtggccgtcaacaatcccaagaagcaggaatgaaagtggcgctttctccgccccagggttccaggacatagtctgaggcaagatggagggtatgaggggccttcacacttcacttcatcccttctacccatcacaacatacaaagcaactacacctggatttttccaaacaacttttatttcctcagagtcttccttaatcctatggaacaagaagctgccactgaatagggcccagtataggggcttgcttttctactccctccccccaatataaaaatatagacttttaaaaaaaaaaaaaaaaaaaaaaaaaaaaaaaaaaaaaaaaaaaaaaaaaaaaaaaactcga

SEQ ID NO: 226 - DNA, 507 bp, Homo sapiens
  misc feature (484): n equals a,t,g, or c
aattcggcacgagccggcgcgaaacgagcgtagttccttgtcgtgtggcctcagtccttcgccgtccctcgccgtccttcgccatcgcacgccaccgcaccccatctctcgaaatctgcagacatcttgatttttcccacgctgtctgtcaggtctccgccgccactcgacgccagggcgccgggccttgtgggctgtgctgcacctcggacggcttcgcaccagccagcgccctctctctcctgcagcactctgatctgcaccccctgaggggcttccactgtccgcggggtgagaatgcccctgggagtgtaacatgactgccgccccatgtgtgtgagaggcgtcctctgggagagcatggatcctgaggtcccaggattgtcagctgacctctgtcctgtgtgcccagtggccccaggtgacgtgtcttcaagaagaggctgakctgcggtgcttgtaaggkctcagccttagatccaanggaacagttccaaaggaaagttc

SEQ ID NO: 227 - DNA, 1041 bp, Homo sapiens
ggcacgagccaccaccactgccacccaagtagggagtgaggagcaccaggagcacaggatgctacttctgccaaccctacaaaaatactctgcacaaatcttcaaaaaacatccttgtcccactgcgtcacctgcggacagatttcatgtcctggtctccttctaaacctggaggtggggcatgaacagggtggagtcacaggggaaagaaaatgagccccaggacacctgggttcacacccagtccccagcgatgtctccaccaccgctgctcaacccctgctgctgctgctgcctctgctgaatgtggaccttccggggccacactgatccgcatccctcttcatcgagtccaacctggacgcaggatcctgaacctactgaggggatggagagaaccagcagaactccccaagttgggggccccatcccctgaggacaagcccatcttcgtacctctctcgaactacaagggatggttacaccaccgatttgatcccaaagcctctactccttccagccaatgggaccaatttgccattcaatatggaactgggcgggtacatggaatcctgagcgaggacaagctgactattggtggaatcaagggtgcatcagtgattttcggggaggctctctgggagcccagcctggtcttcgcttttgcccattttgatgggatattgggcctcggttttcccattctgtctgtggaaggagttcggcccccgatggatgtactggtggagcaggggctattggataagcctgtcttctccttttacctcaacagggaccctgaagagcctgatggaggagagctggtcctggggggctcggacccggcacactacatcccacccctcaccttcgtgccagtcacggtccctgcctactggcagatccacatggagcgtgtgaaggtgggcccagggctgactctctgtgccaagggctgtgctgccatcctggatacgggcacgtccctcatcacaggacccactgaggagatccgggccctgcatgcagccattgggggaa

SEQ ID NO: 228 - DNA, 1658 bp, Homo sapiens
cggggatcagcgcacagagttcttgggagcagcgccgttggggccccctgtytctccaccccatgtctccaccttcaagacaaggtctgcaaagggttttggggctcgaggcccagacgtgctgagtccggccatggtagccctctccaacaagctgaagctgaagcgacactggtagtatgaagagcaagccttccaggacctgagcgggggggacccacctggtggcagcacctcacatttgatgtggaaacggatgaagaacctcaggggtgggagctgccctttgatgccggacaagccactgagcgcaaatgtacccaatgataagttcacccaaaaccccatgaggggcctgggccatcccctgagacatctgccgctgccacagcctccatctgccatcagtcccggggagaacagcaagagcaggttccccccacagtgctacgccacccagtaccaggactacagcctgtcgtcagcccacaaggtgtcaggcatggcaagccggctgctcgggccctcatttgagtcctacctgctgcccgaactgaccagatatgactgtgaggtgaacgtgcccgtgctgggaagctccacgctcctgcaaggaggggacctcctcagagccctggaccaggccacctgagccaggccttctacctgggcagcacctctgccgacgccgtcccaccagcttcactctctccgtctgtwtttgcaactaggtatttctaacgccagcacactatttacaagatggacttacctggcagacttgcccaggtcaccaagcagtggcctttttctgagatgctcactttattatccctatttttaaagtacacaattgttttacctgttctgaaatgttcttaaattttgtaggatttttttcctccccaccttcaatgacttctaatttatattatccataggtttctctccctccttctccttctcacacacaactgtccatactaacaagtttggtgcatgtctgttcttctgtagggagaagctttagcttcattttactaaaaagattcctcgttattgttgttgccaaagagaaacaaaaatgattttgctttccaagcttggtttgtggcgtctccctcgcagagcccttctcgtttcttttttaaactaatcaccatattgtaaatttcagggtttttttttttgtttaagctgactctttgctctaattttggaaaaaaagaaatgtgaagggtcaactccaacgtatgtggttatctgtgaaagttgcacagcgtggcttttcctaaactggtgtttttcccccgcatttggtggattttttattattattcaaaaacataactgagttttttaaaagaggagaaaatttatatctgggttaagtgtttatcatatatatgggtactttgtaatatctaaaaacttagaaacggaaatggaatcctgctcacaaaatcactttaagatcttttcgaagctgttaatttttcttagtgttgtggacactgcagacttgtccagtgctcccacggcctgtacggacactgtggaaggcctccctctgtcggctttttgccayckgtgatatgccataggtgtgacaatccgagcagtgggagtcattcagcsgggrcacttgcgccgctaat

SEQ ID NO: 229 - DNA, 1616 bp, Homo sapiens
  misc feature (54): n equals a,t,g, or c
cgaggaggaggcgagacggccgccgctggtgcttattcttttttagtgcagcgngagagagcgggagtgtgcgccgcgcgagagtgggaggcgaagggggcaggccagggagaggcgcaggagcctttgcagccacgcgcgcgccttccctgtcttgtgtgcttcgcgaggtagagcgggcgcgcggcagcgcggggattactttgctgctagtttcggttcgcggcagcggcgggtgtagtctcggcggcagcggcggagacactagcactatgtcggaggagcagttcggcggggacggggcggcggcagcggcaacggcggcggtaggcggctcggcgggcgagcaggagggagccatggtggcggcgacacagggggcagcggcggcggcgggaagcggagccgggaccgggggcggaaccgcgtctggaggcaccgaaggggcagcgccgagtcggagggggcgaagattgacgccagtaagaacgaggaggatgaaggccattcaaactcctccccacgacactctgaagcagcgacggcacagcgggaagaatggaaaatgtttataggaggccttagctgggacactacaaagaaagatctgaaggactacttttccaaatttggtgaagttgtagactgcactctgaagttagatcctatcacagggcgatcaaggggttttggctttgtgctatttaaagaatcggagagtgtagataaggtcatggatcaaaaagaacataaattgaatgggaaggtgattgatcctaaaagggccaaagccatgaaaacaaaagagccggttaaaaaaatttttgttggtggcctttctccagatacacctgaagagaaaataagggagtactttggtggttttggtgaggtggaatccatagagctccccatggacaacaagaccaataagaggcgtgggttctgctttattacctttaaggaagaagaaccagtgaagaagataatggaaaagaaataccacaatgttggtcttagtaaatgtgaaataaaagtagccatgtcgaaggaacaatatcagcaacagcaacagtggggatctagaggaggatttgcaggaagagctcgtggaagaggtggtgaccagcagagtggttatgggaaggtatccaggcgaggtggtcatcaaaatagctacaaaccatactaaattattccatttgcaacttatccccaacaggtggtgaagcagtattttccaatttgaagattcatttgaaggtggctcctgccacctgctaatagcagttcaaactaaattttttgtatcaagtccctgaatggaagtatgacgttgggtccctctgaagtttaattctgagttctcattaaaagaaatttgctttcattgttttatttcttaattgctatgcttcagaatcaatttgtgttttatgccctttcccccagtattgtagagcaagtcttgtgttaaaagcccagtgtgacagtgtcatgatgtagtagtgtcttactggttttttaataaatccttttgtataaaaaaaaaaaaaaaaaaaaactggggggggggcccggtccccattggccctwtggggggcgtttttaaaaat

SEQ ID NO: 230 - DNA, 1928 bp, Homo sapiens
  misc feature (45): n equals a,t,g, or c
  misc feature (1749): n equals a,t,g, or c
  misc feature (1804): n equals a,t,g, or c
  misc feature (1854): n equals a,t,g, or c
  misc feature (1879): n equals a,t,g, or c
ggacacgagggaaaggggtctccagtgtatttctccagccggggncttaaatccctcttgggagatatgggatggggtggatcggaaaataaatttttttaaatccctaccaaaatatcagctggctttttttaaaaaatcaaataccaaaatctaaatagactccaacagaaaattcaccatctcctctgaccttttcttcccatctcatgctgtgaactgtcttctgttgactttatcgctacctttcttcattctgttattcaaccatgatctctccgtttcattttataagcgttttattaatttcatttatgtatttatttttgactaggtaatgcatgtccatggarcacaaawtcacaaggtttgtaaatgagaaaagacgtgaggttccttttgttctttacctgtggcctccctgccctacacggggactctagggtggaatgtagcaaagcccatccaccagccatgtactaccccccaacccggccaggctggagcgaccgtgtctggggagccgagccccgcttctcgctgcggtgagcccggactggggcacgcactgcgcagactccccgctgcagtgggcggactcccacaggccccgcccctcctcccaccctcgttcagcctgtccagacagaagctggggcccagcggaggtagcagcagacgcctgagagcgaggccgaggcccctcagggtttggagaccctgacacacccaccttctcacctgggctctgcgtatcccccagccttgagggaagatgaagcctaaactgatgtaccaggagctgaaggtgcctgcagaggagcccgccaatgagctgcccatgaatgagattgaggcgtggaaggctgcggaaaagaaagcccgctgggtcctgctggtcctcattctggcggttgtgggcttcggagccctgatgactcagctgtttctatgggaatacggcgacttgcatctctttgggcccaaccagcgcccagccccctgctatgacccttgcgaasagtgctggtggaaagcattcctgagggcctggacttccccaatgcctccacggggaacccttccaccagccaggcctggctgggcctgctcgccggtgcgcacagcagcctggacatcgcctccttctactggaccctcaccaacaatgacacccacacgcaggagccctctgcccagcagggtgaggaggtcctccggcagctgcagaccctggcaccaaagggcgtgaacgtccgcatcgctgtgagcaagcccagcgggccccagccacaggcggacctgcaggctctgctgcagagcggtgcccaggtccgcatggtggacatgcagaagctgacccatggcgtcctgcataccaagttctgggtggtggaccagacccacttctacctgggcagtgccaacatggactggcgttcactgacccaggtcaaggagctgggcgtggtcatgtacaactgcagctgcctggctcgagacctgaccaagatctttgaggcctactggttcctgggccaggcaggcagctccatcccatcaacttggccccggttctatgacacccgctacaaccaagagacaccaatggagatctgcctcaatggaacccctgctctggcctacctggcgagtgcgcccccacccctgtgtccaagtggccgcactccagacctgaaggctctactcaacgtggtgggacaatgcccggagtttcatytacgtcgntgttcatgaactacctgcccamtytggagttyttcccaacctcamaggttctggncctgccattgacgatgggtgcggcggggcaactacgagcgtggcgtcaangtgcgccttgctcataagctgcttnggggacactccggaagccaatccatgcgggcccttcctgggtctcctct

SEQ ID NO: 231 - DNA, 1235 bp, Homo sapiens
  misc feature (1164): n equals a,t,g, or c
  misc feature (1205): n equals a,t,g, or c
  misc feature (1235): n equals a,t,g, or c
gggcgagggtccccggataccgggtctatcacggtctcgggcagggagtctgaatcttttaggggagtgggcccaagccgggtgcaaagaacggggaagggccttccctggctccgtcccggccactttgaccgaatcagcctgttctttcccgaccccgtctcctatcscckagaactgccacgtggggatgagatttgctgggctggtagcggcggctgctgcgggaggtcccgcccacgtgaagccagcctaactgagctctggactttggggacagctgtcagtggcctaggccgcaggacaccatgaagcaactgccagtcttggaacctggagacaagcccaggaaagcaacatggtacaccttgactgtccctggagacagcccctgtgctcgagttggccacagctgttcatatttacccccagttggtaatgccaagagagggaaggtcttcattgttgggggagcaaatccaaacagaagcttctcagacgtgcacaccatggatctgggaaaayaccagtgggacttagatacctgcaagggcctcttgccccggtatgaacatgctagcttcattccctcctgcacacctgaccgtatctgggtatttggaggtgccaaccaatcaggaaatcgaaattgtctacaagtcctgaatcctgaaaccaggacgtggaccamgccagaagtgaccagccccccaccatccccaagaacattccacacatcatcggcagccattggaaaccagctatatgtctttgggggcggagagagaggtgcccagcccgtgcaggacacgaagctgcatgtgtttgacgcaaacactctgacctggtcacagccagagacacttggaaatcctccatctccccggcatggtcatgtgatggtggcagcagggacaaagctcttcatccacggaggcttggcgggggacagattctatgatgacctccactgcattgatataagtggacatgaaatggcaggaagcttaaatcccactgggggcttgcttccagcaggctgtgctgcccactcagctgtggccatgggaaaacatgtgtacatctttggtggrattgactcctgcagggcactggacacatgttaccaktwtcacacagaagagcagcattggaccttgcttnaaatttgatactcttctaccccctgggacgatttggaccantccatgtggtatcattccatgggcagtgan

SEQ ID NO: 232 - DNA, 2547 bp, Homo sapiens
  misc feature (2534): n equals a,t,g, or c
  misc feature (2544): n equals a,t,g, or c
accagcaccccgcccagagcagtgccgctgcccaaatcctcgcaggcagctcatcaacgcaattgcaactccggctggagccccggacctgcaagcctgggtgtccgtgggtccgtctgcccagccatctgctggtggcacctctccctcctgccgcctccctcggtgaaccccaccttgcagaagtgcagctcgcccggagcagcccaggagctcagcatgcgtcccccaggcttcaggaacttcttgctgctggcgtcctcccttctctttgctgggttgtcagctgttcctcaaagcttctcgccatctctgaggagctggccgggcgccgcctgcaggctgtcccgggccgagtcggagcgacgctgccgcgcacctgggcagcccccgggggccgcgctgtgccacggccggggccgctgcgactgcggcgtctgcatctgccacgtgactgagccgggcatgttcttcgggcccctgtgtgagtgccatgagtgggtgtgcgagactacgacgggagcacctgtgcaggccatggtaagtgtgactgtggcaagtgcaagtgtgaccagggatggtatggggatgcttgccagtacccaactaactgtgacttgacaaaaagaaaagtaaccaaatgtgcaagaattcacaagacatcatctgctctaatgcaggtacatgtcactgtggcaggtgtaagtgtgataattcagatggaagtggacttgtgtatggtaaattttgtgagtgtgacgatagagaatgcatagacgatgaaacagaagaaatatgtggaggccatgggaagtgttactgtggaaactgctactgcaaggctggttggcatggagataaatgtgaattccagtgcgatatcaccccctgggaaagcaagcgaagatgcacgtctccagatggcaaaatctgcagtaacagagggacttgtgtatgtggtgaatgtacctgtcacgatgttgatccgactggggactggggagatattcatggggacacctgtgaatgtgatgagagggactgtagagctgtctatgaccgatattctgatgacttctgttcaggtcatggacagtgtaattgcggaagatgtgactgcaaagcaggctggtatgggaagaagtgtgagcacccacagtcctgcacgctgtcagctgaggagagcatcaggaagtgccagggaagctcggatctgccttgctctgggaggggtaaatgtgaatgtggcaaatgcacctgctatcctccaggagatcgccgggtgtatggcaagacttgtgagtgtgatgatcgccgctgtgaagacctcgatggtgtggtctgtggaggccacggcacatgttcctgtggtcgctgtgtttgtgagagaggatggtttggaaagctctgccaacatccgcggaagtgtaacatgacggaagaacaaagcaagaatctgtgtgaatcagcagatggcatattgtgctcggggaagggttcttgtcattgtgggaagtgcatttgttctgctgaagagtggtatatttctggggagttctgtgactgtgatgacagagactgcgacaaacatgatggtctcatttgtacagggaatggaatatgtagctgtggaaactgtgaatgctgggatggatggaatggaaatgcatgtgaaatctggcttggctcagaatatccttaacaattacatgagagaggtctggattcttattttttctgggccattagaacatataaatgcgaaggaaaccatgtatattcaccactaggacaggttaaaaagaccattgtatgtttttctatttctgaattacgaatgaaatccgagtacctattagaaatgagttatgcaaatttagatgcaaataacattagaaaaaaaagattcttccataattaacataagtggttcctaacgagagcaatttttccacccaaaagtcatttggcaacatctacagacaattttgattgtcacactgggtcgggtaggaaggtatgctgcagacatttggtgggtagaggccagggatgctgctgagcatcccgcagtgtacaggacagcccccaaacaaggaattatccagccccaaatgccaatagggctcaaactgagaaacattgagttatatggctattagaaatccacattcttacacaagaaagaccatattagaatctaaggaaaacatgcatattcacattaattaatcgatcagatttttccagaattccgtatcagtcaccattttaatatggggacaatgaagacaagcacacaggaggtagaatatcagagtggggctggatcaagggcaaaaactggtcattaagtcatctgacattaaatcatttagccactaagttatttgtctactctcactttaaactcaccaaagaagattctcttaaagaaattatgaaaaatgtacaatttaacattttaaataaatagtgacagaagttgtttaaaaaaaaaaaaaaaaaagggsggccgcyctagkggttccccnagctttacgntac

SEQ ID NO: 233 - DNA, 1004 bp, Homo sapiens
  misc feature (967): n equals a,t,g, or c
ggaaggtcactcaggaacaccctccctgcctgtgcaaagagaaaacaagcgccttgtttcaaaaaaacccggctcaccctggtttgtgagagtgccccgggaccaatcaccatggaccttactggagatctggaagccctcaaaaaggaaaccattgtgttaaaggaaggttctgaatatagagtcaaaattcacttcaaagtgaacagggatattgtgtcaggcctgaaatacgttcagcacacctacaggactggggtgaaagtggataaagcaacatttatggttggcagctatggacctcggcctgaggagtatgagttcctcactccagttgaggaggctcccaagggcatgctggcscgaggcacgtaccacaacaagtccttcttcaccgacgatgacaagcaagaccacctcagctgggagtggaacctgtcgattaagaaggagtggacagaatgaatgcatccacccctttccccacccttgccacctggaagaattctctcaggcgtgttcagcaccctgtccctcctccctgtccacagctgggtccctcttcaacactgccacatttccttattgatgcatcttttcccaccctgtcactcaacgtggtccctagaacaagaggcttaaaaccgggctttcacccaacctgctccctctgatcctccatcagggccagatcttccacgtctccatctcagtacacaatcatttaatatttccctgtcttacccctattcaagcaactagaggccagaaaatgggcaaattatcactaacaggtctttgactcaggttccagtagttcattctaatgcctagattcttttgtggttgttgctggcccaatgagtccctagtcacatcccctgccagagggagttcttcttttgtgagagacactgtaaacgacacaagagaacaagaataaaacaataactgtgaaaaaaaaaanaaaaaaaaaacycgrgggggggcccggaacccatttg

SEQ ID NO: 234 - DNA, 2110 bp, Homo sapiens
  misc feature (2067): n equals a,t,g, or c
ggcgtacaggcggaagtaagggtgagaggaggctgcaacgccgagcggaggaggcaggaaccggagcgcgagcagtagctgggtgggcaccatggctgggatcaccaccatcgaggcggtgaagcgcaagatccaggttctgcagcagcaggcagatgatgcagaggagcgagctgagcgcctccagcgagaagttgagggagaaaggcgggcccgggaacaggctgaggctgaggtggcctccttgaaccgtaggatccagctggttgaagaagagctggaccgtgctcaggagcgcctggccactgccctgcaaaagctggaagaagctgaaaaagctgctgatgagagtgagagaggtatgaaggttattgaaaaccgggccttaaaagatgaagaaaagatggaactccaggaaatccaactcaaagaagctaagcacattgcagaagaggcagataggaagtatgaagaggtggctcgtaagttggtgatcattgaaggagacttggaacgcacagaggaacgagctgagctggcagagtcccgttgccgagagatggatgagcagattagactgatggaccagaacctgaagtgtctgagtgctgctgaagaaaagtactctcaaaaagaagataaatatgaggaagaaatcaagattcttactgataaactcaaggaggcagagacccgtgctgagtttgctgagagatcggtagccaagctggaaaagacaattgatgacctggaagataaactgaaatgcaccaaagaggagcacctctgtacacaaaggatgctggaccagaccctgcttgacctgaatgagatgtagaacgccccagtcccaccctgctgctgctcctccctctgacccagactccgcctgaggccagcctgcgggaagctgacctttaactgagggctgatctttaactggaaggctgctttctcctttcaccaccccctccttccctgtgtctttttcgccaaactgtctctgcctcttcccggagaatccagctgggctagaggctgagcacctttggaaacaacatttaagggaatgtgagcacaatgcataatgtctttaaaaagcatgttgtgatgtacacattttgtaattaccttttttgttgttttgtagcaaccatttgtaaaacattccaaataattccacagtcctgaagcagcaatcgaatccctttctcacttttggaaggtgacttttcaccttaatgcatattcccctctccatagaggagaggaaaaggtgtaggcctgccttaccgagagccaaacagagcccagggagactccgctgtgggaaacctcattgttctgtacaaagtactagctaaaccagaaaggtgattccaggaggagttagccaaacaacaacaaaaacaaaaaatgtgctgttcaagttttcagctttaagatatctttggataatgttatttctattttttatttttttcattagaagttaccaaattaagatggtaagacctctgagaccaaaattttgtcccatctctaccccctcacaactgcttacagaatggatcatgtcccccttatgttgaggtgaccacttaattgctttcctgcctccttgaaagaaagaaagaaagaagactgtgtttttgccactgatttagccatgtgaaactcatctcattacccttttctgggtttgaagctgctgtctctagaagtgccatctcaattgtgctttgtatcagtcagtgctggagaaatcttgaatagcttatgtacaaaactttttaaattttatattattttgaaactttgctttgggtttgtggcaccctggccaccccatctggctgtgacagcctctgcagtccgtgggctggcagtttgttgatcttttaagtttccttccctacccagtccccattttctggtaaggtttctaggaggtctgttaggtgtacatcctgcagcttattggcttaaaatgtactctccttttatgtggtctctttggggccgattgggagaaagagaaatcaataggcacgttgaacgaaatgnaggctttgaaaagaccagcccccaaaaaaaaaaaaaaagggcg

SEQ ID NO: 235 - DNA, 3528 bp, Homo sapiens
  misc feature (92): n equals a,t,g, or c
  misc feature (237): n equals a,t,g, or c
tctgagctctgcagctcctttccatsggaacttgacwtccacctcccgagagcttgctgtttttatktgcactgacttggccaggacggrcnactcctgcctggkacgaaccatgcmagagtggcamctcccctgaggtctggagtactgtggctgcattgagcacgtgtcctgartascccctcttacccgcctcaatctccccgcctgtaggatgggagcggattggactacatngtctctgagggccctcgcggctcmagcgccagcgctggagagagagtctgagggtaccacgggcgtgctgrcctgggtgctcactcccgccctccttcatgagcggctttcctctgggtgtgtccagggcatcacagagctcttctgcccaaacccggaggcctaccagggcctgcccaccttgcctccttccacactctctgtagcagcagccgcagccatggcggggatgaagacagcctccggggactacatcgactcgtcatgggagctgcgggtgtttgtgggagaggaggacccagaggccgagtcggtcaccctgcgggtcactggggagtcgcacatcggcggggtgctcctgaagattgtggagcagatcaatcgcaagcaggactggtcagaccatgctatttggtgggaacagaagaggcagtggctgctgcagacccactggacactggacaagtacgggatcctggccgacgcacgcctcttctttgggccccagcaccggcccgtcatccttcggttgcccaaccgccgcgcactgcgcctccgtgccagcttctcccagcccctcttccaggctgtggctgccatctgccgcctcctcagcatccggcaccccgaggagctgtccctgctccgggctcctgagaagaaggagaagaagaagaaagagaaggagccagaggaagagctctatgacttgagcaaggttgtcttggctgggggcgtggcacctgcactgttccgggggatgccagctcacttctcggacagcgcccagactgaggcctgctaccacatgctgagccggccccagccgccacccgaccccctcctgctccagcgtctgccacggcccagctccctgtcagacaagacccagctccacagcaggtggctggactcgtcgcggtgtctcatgcagcagggcatcaaggccggggacgcactctggctgcgcttcaagtactacagcttcttcgatttggatcccaagacagaccccgtgcggctgacacagctgtatgagcaggcccggtgggacctgctgctggaggagattgactgcaccgaggaggagatgatggtgtttgscgccctgcaggacagsctcaccaccatcccagagctcaaggaccatctccgaatctttcggccccggaagctgaccctgaagggctaccgccaacactgggtggtgttcaaggagaccacactgtcctactacaagagccaggacgaggcccctggggaccccattcagcagctcaacctcaagggctgtgaggtggttcccgatgttaacgtctccggccagaagttctgcattaaactcctagtgccctcccctgagggcatgagtgagatctacctgcggtgccaggatgagcagcagtatgcccgctggatggctggctgccgcctggcctccaaaggccgcaccatggccgacagcagctacaccagcgaggtgcaggccatcctggccttcctcagcctgcagcgcacgggcagtgggggcccgggcaaccacccccacggccctgatgcctctgccgagggcctcaacccctacggcctcgttgccccccgtttccagcgaaagttcaaggccaagcagctcaccccacggatcctggaagcccaccagaatgtggcccagttgtcgctggcagaggcccagctgcgcttcatccaggcctggcagtccctgcccgacttcggcatctcctatgtcatggtcaggttcaagggcagcaggaaagacgagatcctgggcatcgccaacaaccgactgatccgcatcgacttggccgtgggcgacgtggtcaagacctggcgtttcagcaacatgcgccagtggaatgtcaactgggacatccggcaggtggccatcgagtttgatgaacacatcaatgtggccttcagctgcgtgtctgccagctgccgaattgtacacgagtatatcgggggctacattttcctgtcgacgcgggagcgggcccgtggggaggagctggatgaagacctcttcctgcagctcaccgggggccatgaggccttctgagggctgtctgattgcccctgccctgctcaccaccctgtcacagccactcccaagcccacacccacaggggctcactgccccacacccgctccaggcaggcacccagctgggcatttcacctgctgtcactgactttgtgcaggccaaggacctggcagggccagacgctgtaccatcacccaggccagggatgggggtgggggtccctgagctcatgtggtgccccctttccttgtctgagtggctgaggctgatacccctgacctatctgcagtcccccagcacacaaggaagaccagatgtagctacaggatgatgaaacatggtttcaaacgagttctttcttgttactttttaaaatttcttttttataaattaatattttattgttggatcctcctcctttctctggagctgtgcttggggctactctgacactctgtctcttcatcaccagccaaggaaaggggctttcgggtagggcgtagtgcagggcctccttgaagtacttgggaaggaggaagccatcagtattccctggagtcagaatcaccccattggcagagcggaagaagggtattccatctgccagagccagggktccatcgatgaacacagctatttcacaatgggaccgcatgccactgatgataccggggtctccaggcagtcctggggccaggtgaatgtgcgtccttccctggcaggacaggcctttgagtaggatggatggccagtgcttccagaatgtaccatggactagcatcgggggcagggcctgcggtgtctccaggggcatcagctccaacttaggtacctgcagggaatggccctggttggcccggatgagaaggccagtgctgggatcccccagctgcagggcgaaccgctgcttcctattggtgtccaccacgcgctgcacatcttcagcaragaagccgcggaactggggcaactgcaggagggtgcccaggggcacgaagccatcagctcccatgggaagccccagcttcaaggccccatggcgcagggcataggacagagccttggacagctgcacgtctcggtcccaaggtcacaccgtcagccmggagcgcagggaggccgagccccgcaccccagatcgctggtgcgcccgcagggtggtccgggaggcagggccgacgtgccgacggaccgggcggaagcgtcggggcggcggggacaaacctgcc

SEQ ID NO: 236 - DNA, 538 bp, Homo sapiens
  misc feature (538): n equals a,t,g, or c
gacagtcaaagtgtgggcaactcatcgccagaaattcctgttctccctgagccagcatatcaactgggtccgctgtgccaagttctcccccgacgggcggctcatcgtgtctgccagtgatgacaagactgttaagctgtgggacaagagcagccgggaatgtgtccactcgtattgtgagcatggcggctttgtcacctatgtggayttccaccccagtgggacgtgcattgccgctgccggcatggacaacacagtgaaggtgtgggacgtgcggactcaccggctgctgcagcattatcagttgcacagtgcagcagtgaacgggctctctttccacccgtcgggaaactacctgatcacagcctccagtgactcaaccctgaagatcctggacctgatggaggggccggctgctctacacactccacggggcatcagggaccagccacactggccaagctccatggggaatctgccagaagtggacttccctgttcccccaaggcagaagcaaggagtgttggagtctgtgcan

SEQ ID NO: 237 - DNA, 2028 bp, Homo sapiens
  misc feature (5): n equals a,t,g, or c
  misc feature (7): n equals a,t,g, or c
  misc feature (8): n equals a,t,g, or c
  misc feature (18): n equals a,t,g, or c
  misc feature (24): n equals a,t,g, or c
  misc feature (1952): n equals a,t,g, or c
  misc feature (1963): n equals a,t,g, or c
  misc feature (1968): n equals a,t,g, or c
  misc feature (2003): n equals a,t,g, or c
gtttntnncccgcacttntggccnccaagctatttaggtgacactatagaaggtacgcctgcaggtaccggtccggaattcccgggtcgacccacgcgtccgtgtccccggacgatattgaacaatggttcactgaagacccaggtccagatgaagctcccagaatgccagaggctgctccccgcgtggcccctgcaccagcagctcctacaccggcggcccctgcaccagccccctcctggcccctgtcatcttctgtcccttcccagaaaacctaccagggcagctacggtttccgtctgggcttcttgcattctgggacarccaaktctgtracttgcacgtactcccctgccctcaamaaratkttttgscaactggccaaracctgccctgtgcagctgtgggttgattcggcasasccccgcccggcacccgcgtccggccatggccatctacaagcagtcacagcacatgacggaggttgtraggcgctgcccccaccatgagcgctgctcagatagcgatggtctggcccctcctcagcatcttatccgagtggaaggaaatttgcgtgtggagtatttggatgacagaaacacttttcgacatagtgtggtggtgccctatgagccgcctgaggttggctctgactgtaccaccatccactacaactacatgtgtaacagttcctgcatgggcggcatgaaccggaggcccatcctcaccatcatcacactggaagactccagtggtaatctactgggacggaacagctttgaggtgcgtgtttgtgcctgtcctgggagagaccggcgcacagaggaagagaatctccgcaagaaaggggagcctcaccacgagctgcccccagggagcactaagcgagcactgcccaacaacaccagctcctctccccagccaaagaagaaaccactggatggagaatatttcacccttcagatccgtgggcgtgagcgcttcgagatgttccgagagctgaatgaggccttggaactcaaggatgcccaggctgggaaggagccaggggggagcagggctcactccagccacctgaagtccaaaaagggtcagtctacctcccgccataaaaaactcatgttcaagacagaagggcctgaytcagactgacattctccacttcttgttccccactgacagcctcccacccccatctytccctcccctgccattttgggttttgggtctttgaacccttgcttgcaataggtgtgcgtcagaagcacccaggacttccatttgctttgtcccggggctccactgaacaagttggcctgcactggtgttttgttgtggggaggaggatggggagtaggacataccagcttagattttaaggtttttactgtgagggatgtttgggagatgtaagaaatgttcttgcagttaagggttagtttacaatcagccacattctaggtaggggcccacttcaccgtactaaccagggaagctgtccctcactgttgaattttctctaacttcaaggcccatatctgtgaaatgctggcatttgcacctacctcacagagtgcattgtgagggttaatgaaataatgtacatctggccttgaaaccaccttttattacatggggtctagaacttgacccccttgagggtgcttgttccctctccctgttggtcggtgggttggtagtttctacagttgggcagctggttaggtagagggagttgtcaagtctctgctggcccagccaaaccctgtctgacaacctcttggtgaaccttagtacctaaaaggaaatctcaccccatcccacaccctggaggatttcatctcttgtatatgatgatctggatccaccaagacttgttttatgctcaggcratccacctggtctcagcctccccagagtgctggggattaaaattgtgagccaaccaagtncagctgggaangggcnaacatcttttaacattctggcaagcaacatctggnattttcaaccccaaccctttcccct

SEQ ID NO: 238 - DNA, 1515 bp, Homo sapiens
  misc feature (1495): n equals a,t,g, or c
  misc feature (1508): n equals a,t,g, or c
  misc feature (1510): n equals a,t,g, or c
cagacgcgtgggtcgcccacgcgtccgaaaaaaaccgtgattcatctggaagttattacagggccagcttgccatattccaggcacacgttatcaagtttgggcctattgtggcctctgacttctctttcttcagccttttgaccacttattaattagtccatttgctagaagagtggtcaagggaaaaacgagagatgaaatttagttaagtctatgtgagcaagtgagagaaggttaggtaaggggagaggatggaatgcttgcctccaatgaactttggagcttgtatgtgagtcagattgctcccctattgctattatctattactcttgagagctggctgtcctttgaaagaaagaagtaatgttctttgaaagaaagaaaaatctcttgctgtgtcaaacctcaaaatgttgctattggggttagaargsctcctctttatgctttttaatgctctttcaaacgtgttcttttagaccagttttctaataagctttgtaaaatgtwctatccaaattagaarcggatttggaaatgcaaactaacgtgcacttagatatccaagtgggtgagcttagccactcttacccatgctctttccctggaatccctggagacctgtccaagatgatttccatataccagcatagaaaatcagaatcaagagcaaactctgagactggcacaatccaagaagatttcctggctctggcttttagtaatttgggactccaactgccactgtactggactgtaatttataaatccagtagctacgcagggtggaggctgggctgaggattaccataatgaaatgtactaaatcttcatttaggtatgcaattgtgaagtgaaggcatctgctttctttacagtatcagagtccaagaacaggatgtcaccatagataaaagcctcatacaaaggcagaactacactccaaatttaatgtgtttaaattggtggggcaccagcagaaaatacttctagctcagctttactcttcttccacactaggctgggcccagcaatacaggagaggatgaagggaggagctccaggaggcgagggaagagccctagcagggcggccatcacaaccactcactgagagttgcccttcttaaaaatgtattttattttagccagtgggtcccttcctttctcctttcctctctactgctcaagaacagatttgaggccaggtgcggtgcctcacatctgtaatcccaacactttgggaggctgagatgggtggattgcttgagcccaggagttcaagaccagcctgggcaacacagcgagaccccatctcttaaaaaataacagacttgaggaacccctctcccttccataattcccctcatccaccgcccactccaggcactcactcaaacttgctcttcaactctgtatacaagcagaagcaataaaccaatctgattttcttttcaaaaaaaaaaaaaaaaactcgagggggggcccgtcccnactcccctatagngnccacc

SEQ ID NO: 239 - DNA, 1728 bp, Homo sapiens
gcaactatgacaaagcttacataagaattagaagaccactttacatttttacattccttctgctgttcatattaaccttgcacaattacttcattttttctttgactcttttaccacaatgttttggttatttataatttatcagccatatgtttatcagccatataaccaactagatcccaaatagatccatgtatttgtttccgtgatttggccacattaataaattcataaatttcaatcaaatatcttatatatacacacatatggtttaagctacagccctgtgtatgccgtttaactttatttgacgttgcccacttacttctttgctgaccacttggataaccgtaataaaaatcctataagcctaaatggcatttcttttgggatatttttcctgcattttattccctttttatataagtaggaattaattatttattttatgtcttaatctatttgataaagaagactacattataataatctcaaagatcatattaccaaaggttgcccacttgagcatattttcattttgacacagaaacaaaatttagtacaacctttcctagttcccatgtcttgattttcatcattacatgcacagcagacctttacctattgtgataccagaacacatcattgtctttggttcccttcaaagagaattttattgttgttttgtattttcaagtccttaatagttcttgaaactcctagttgttttcttgttgaaagcagacacacatttagtgcacggcttattttacctttcgggtgaaagatcagatgtttttatacccttcacttgatcaatatatttggaaagaatgtttatcaaaagtctatgtcactgcttctacagaagaatgaaattaatgcttaggtgatggtacctccacctacatctttttgagtgcattcaattatgtattttggtttagcttctgatttaacatttaattgattcagtttaaacatgttacttaattagcaaatgtagaggaaccaaaaaaaggtgaaaataatatgttttgattcaaacctaaagacataaaaacataaagacattttaactttgggttctctttagctgggatctggccagaaggaggcttaaagttagaaattgctattattttagaataggttgggtgggttggggggcaagggtgtctatttgcagcagagatattttgaaaagaagaaaattgttttatataaaaaggaaagccatgaccacctttctacctcagatccatcttcatccattgcattggaaactgctttatgctgctgcagtctgcaaagtctagagcttttatcaggccatgtcatacccaagaaagcacctatttaaagaaaaaacaattccctgagctctcaactccaagttgtagatttggtgtcttccttgttcttactttaaaaagtcatgtgttaattttttttctgcctgtatttgtatgcaaaatgtcctctatctgctattaaagaaaagctacgtaaaacactacattgtaaccttctaagtaataataaataaaaagaaatatattgcagtaacaatgggaagtaagtatgtagttcttttgaaatatgtggtaaagaactaatcacagactatcatctaatctggttacatattgtatttttcatcctgaataaaagtaattttaacacaaaaaaaaaaaaaaaaccccgggggggggccccgggaaccca

SEQ ID NO: 240 - DNA, 1117 bp, Homo sapiens
  misc feature (1113): n equals a,t,g, or c
cctttcatcagagtcaattctggacgtgagattccttataatctaattatacctgaggttgagcaagaaatgtcttcctttagaaaatctcattcaagtcaggttcttctctacagttcaaaattgagaatggatttaattaactagcatttagccagctttttcttgcccttggagaaaaagaatcattctcaacctgataatctgttaagaaaaatcccatatgaacaatctggtcattaacatacatatgatacggagtctctttgttgtcaccaagtgaacatacttctcatggtgggttggacagtaatacatgttagagggtcagaagcttctggtttctgctgtttgctttaaatacccttggggtttttttttaaacccttacaaggggagcatcagctttggaaagtgtgactctgtaggagtgtagaaggcagtggtgtatgatcttagcctcgtcctgatgcctgaatccagccagctgttgctctgacccacagcaatagagcaagttacccatcaccagcatttgtacagagcagggaattctggttttagtccattggtagcattgtgtgtatgaggagattcaacaccacagacagctgcaggactcgatatccatggcttctttccatcacaaaacgggtagaaacacattcactgcttcagggttctaatctgtgtgtctccttatgactccatttctgtaagctactctgtaactttgatatatgctgtattttctttctttaaaagatttagatgttttttcagcaagctagccatacaaccattgtatctctttctcttcagtatggtttagagcccagatcagttagtaggctttcgttgtcttctctttcaatacatgtacatctttactgtttgaaaagtgttacagctgtcaaagaatcttcatggacctgaagataatttcttgtgaagttgaatgcaagtgtactgtcattcatagtgtttatatcaaaataccaggaatcttcacttttgctaccttgatatagcattgggctatcatgttacaacattgaaatacattgatttattaaaaaatacttttataagaaaaaaaaaaaaaaaaaattnctcg

SEQ ID NO: 241 - DNA, 2371 bp, Homo sapiens
  misc feature (2366): n equals a,t,g, or c
  misc feature (2371): n equals a,t,g, or c
ccggaattcccgggtcgacccacgcgtccggggcagccagcagcttccccttctctgccctgctccaggcaccaggctctttccccttcagtgtctcagaggaggggacggcagcaccatggacccccgcttgtccactgtccgccagacctgctgctgcttcaatgtccgcatcgcaaccaccgccctggccatctaccatgtgatcatgagcgtcttgttgttcatcgagcactcrgtagaggtggcccatggcaaggcgtcctgcaagctctcccagatgggctacctcaggatcgctgacctgatctccagcttcctgctcatcaccatgctcttcatcatcagcctgagcctactgatcggcgtagtcaagaaccgggagaagtacctgctgcccttcctgtccctgcaaatcatggactatctcctgtgcctgctcaccctgctgggctcctacattgagctgcccgcctacctcaagttggcctcccggagccgtgctagctcctccaagttccccctgatgacgctgcagctgctggacttctgcctgagcatcctgaccctctgcagctcctacatggaagtgcccacctatctcaacttcaagtccatgaaccacatgaattacctccccagccaggaggatatgcctcataaccagttcatcaagatgatgatcatcttttccatcgccttcatcactgtccttatcttcaaggtctacatgttcaagtgcgtgtggcggtgctacagattgatcaagtgcatgaactcggtggaggagaagaraaactccaagatgctccagaaggtggtcctgccgtcctacgaggaagccctgtctttgccatcgaagaccccagaggggggcccagcaccacccccatactcagaggtgtgaccctcgccaggccccagccccagtgctgggaggggtgragctgcctcataatctgcttttttgctttggtggcccctgtggcctgggtgggccctcccgcccctccctggcaggacaatctgcttgtgtctccctcgctggcctgctcctcctgcagggcctgtgagctgctcacaactgggtcaacgctttaggctgagtcactcctcgggtctctccataattcagcccaacaatgcttggtttatttcaatcagctctgacacttgtttagacgattggccattctaaagttggtgagtttgtcaagcaactatcgacttgatcagttcagccaagcaactgacaaatcaaaaacccacttgtcagttcagtaaaataatttggtcaaacaacagtctattgcattgatttataaatagttgtcagttcacatagcaatttaatcaagtaatcattaattagttaccccctatatataaatatatgtaatcaatttcttcaaatagcttgcttacatgataatcaattagccaaccatgagtcatttagaatagtgataaatagaatacacagaatagtgatgaaattcaatttaaaaaatcacgttagcctccaaaccatttaattcaaatgaacccatcaactggatgccaactctggcgaatgtaggacctctgagtggctgtataattgttaattcaaatgaaattcatttaaacagttgacaaactgtcattcaacaattagctccaggaaataacagttatttcatcataaaacagtcccttcaaacacacaattgttctgctgaagagttgtcatcaacaatccaatgctcacctattcagttgctctgtggtcagtgtggctgcatagcagtggattccatgaaaggagtcattttagtgatgagctgccagtccattcccaggccaggctgtcgctggccatccattcagtcgattcagtcataggcgaatctgttctgcccgaggcttgtggtcaagcaaaaattcagccctgaaatcaggcacatctgttcgttggactaaacccacaggttagttcagtcaaagcaggcaacccccttgtgggcactgaccctgccactggggtcatggcggttgtggcagctggggaggtttggccccaacagccctcctgtgcctgcttccctgtgtgtcggggtcctccagggagctgacccagaggtggaggccacggaggcagggtctctggggactgtcggggggtacagagggagaaggctctgcaagagctccctggcaatacccccttgtgtaattgctttgtgtgcgacagggaggaagtttcaataaagcagcaacaagcttcaaaaaaaaaaaaaaaaaaaaaaaaaaaaaaaaaaaaaaaaaaaaaaaaaaaaaaaaaaaaaaaaaaaaaaaaaaaaaaaaaaaaaaaaaaaaaaaagggnggccn

SEQ ID NO: 242 - DNA, 3276 bp, Homo sapiens
  misc feature (125): n equals a,t,g, or c
  misc feature (455): n equals a,t,g, or c
  misc feature (1014): n equals a,t,g, or c
  misc feature (3276): n equals a,t,g, or c
ggactagtgatgatgattctgaaagccggcggcggctcgataaagatagcgggttcacctactcctggcaccgacgggatagcagcgaggggccccctggcagtgagggggatggcgggggccanagcaagccaagcaatgccagtggaggggtggacaaggccagccccagtgagaacaatgctggtgggggcagtccctccagcggctcgggtggcaacccaccaatacatcgggtaccacacgccgctgtgccggccccagcaactccatgcagctggcctctcgcagtgctggggagctcgttgagagcctcaaactcatgagcctctgcctcggctcccagcttcatgggagcaccaagtacattattgatccacagaatggcttgtcattttccagtgtgaaagtccaagagaaatytacgtggaaaatgtgcattagctccacagggnatgcagggcaggtccctcagtgggcggcataaagtttttctctgaccacatggcagataccaccactgaattggaacggataaagagcaagaacctgaaaaataacgtgctgcagctacctctgtgcgaaaagaccatctctgtgaacatccagcggaaccctaaggaggggctctgtgcgcatccagcccagccagctgttgccatgtcatctgactgtggccccatctggccgctagcacgcttcctgctcagagcagtgaagaccggctcacttcactgttccatttggttttactattttaaagtgggcgttaggagcaattatttattacctttccatttgtwcgcctgatgatgtgacaatgcatggtctttgtgcatgctgctagacactttwmtttcccagccgaaaagcctattatgtaatttttacattcataattttaatgtggatgatcaggattaaatcaagatatatatctggaacctcttataaatggagcacttagaaatttgttgttctgcacttaacctagagagagaaaaaatgcttttnctttgtgaaaaatctgaattcctgtcctgaccttctgtgatgtggaaaccctaggctctgagacacactctctggtgtctgagacagaaccaaagcaataacgttgtgatgcccacaggcctggagccagctagcgaccttgtgccgcccagctgtccatggcccgtgcagagcagaggacagtgagtgtctgcactgagaaccttaaaccacagttgaacatacccacacctgtttgtcttaagctatagtgtaaaaacaaagtttgggctctgaaaatttaactgaaaaagatttccttgtttttgtaataggtgagataaagtacttagatttataaggcagcttcccctgtagtgataaattacaagcagacaatcttattttgtaatgtgatgaagtgatgatgtcttaactctacttagagagtgtatgtctgtctaacagaacaaaaagatgctctgtgtaaattccttcctgtagggcacactgcaggatttccatgtagatagaagaactatagggcctagtacagaaggtgcacacaaatgttggcaaagtcaaaaccccatgaattaaaacctactggaatttggtttttaggagtttggtaattagattatctcttttgttattttcattcagttatatcctttggctcagctagctttgaaattggctgatgaaaaaatatacataaaagggtaaaattcacacatacagcaaacaaaaatgcacaaagcctgcttcgtaacttttttttctggaattgtttttcactttgcctttttctgccaaaacaataatcaaagaactcttgctttaacctattcctgtacaaagactgtttttgaccagataatcatctgttgtggcattctatcttgtaggacactgtatattgcaaattgctgattatggaaggggccagttgctgttttttcatgcagtgccctgggagtcttaaaagcagtgcttagcaacattggtgatagcatgtggctgggacccagggcccttccccactcttcagccccgagtcatgtgtctgaggtgacggactgagacgcatctggtcctgtaattcagagagtgggcacatcaccaaagaactgcattgctgtggtcactgtttcttcaagtacacactgactctgctactttaggataaatatattttactcagaactctgaatttcacagtatacttactaaactaagtaaaaatgatacttaaaatacttattttactttctagacctaggctagatgttttaagctacagctctagttcattgtgatatttataatttgaaagctatgagaatagatgtgtgggtgaagccatagaacatatttgcttgaaattcttgagcagggatcttataaagggccagaaataagatgtgtggttcacatagatagtgagcgtaacatctgtattaaacataggagagaagtttataaagggcattggcaataaactctttgttgcagctgttttccaagcagtgtaaatactttttcctgtgattatgtatagccttggaatggcaccttttaactaacccatatgtgtttggtttcaatggttttttatattcagatgtatatakggtgctcactttaggatcagcagtgttgaccatttatgctgcatagctgtattatagccttattagttgtgtggttgacccttggggtatacaaatgtcagtctgagtggtgtcttactccttgkttataagtgaatgattgtgcatgtttkgtatgycatagtatgtcgtcacataaaagggagggagcgaaaaaccattacattaagataatattggaccaaactacttacttgctctaaacagttacttgtaccccttaacctgtcttcaaaagttgcatatagttacagtagtgtataaattaaatattgtggaaaaacagtcttgtatttttctgtatgtgtgtatatatatataattatgtacttctggcaattctatctgtatttaaagatgtgacaatcttgacaccaattttaagaatagctgtgagaccgaattaaagataatccctaccaagtgaaaattgatgtgtgttaagagggtacagaattatcaactgatttggtcagttgcttccaatgctggttgatttccctcattgtgtaaacattgacaggtatgtgacaaatgggaaaaaaaatccaaataataaagtgacatattggtgttcagcaatataaaaagggtggggggggggggn

SEQ ID NO: 243 - DNA, 736 bp, Homo sapiens
  misc feature (435): n equals a,t,g, or c
ggcacgagcgtggaaacatattgactacttcaacaatcagatcattgttgacctcgtggagcaacagcacaaagggatcattgcaatccttgatgatgcttgcatgaatgtcggcaaagtcaccgatgaaatgtttcttgaagcacttaacagtaaattgggcaaacacgcccatttttccagccgaaagctctgtgcctcagacaaaattctggagtttgatcgaaattttcgaattcgacattatgcaggcgatgtagtctattctgtcattggttttattgacaaaaataaagatactttatttcaagatttcaagcgccttatgtataacagttcaaatcctgtgctcaagaatatgtggcctgaaggcaaactgagcattacagaggtgaccaagcgacctctgactgctgctaccttgtttaagaattntatgattgctctagtagacaaccttgcatcaaaggaaccatattacgttcgttgcatcaaacccaatgacaagaaatctccacagatatttgatgatgaacgctgccggcaccaagtagaatatcttggactactggaaaatgtgagagtgcgtcgggcaggatttgccttccgccagacatacgagaagtttcttcacaggtataagatgatctctggaattgcacctggcccaaccatggaccttcctttcagacaaagaggctgtcaagaaactaatttgaacggtgtggttttcagg

SEQ ID NO: 244 - DNA, 2311 bp, Homo sapiens
  misc feature (236): n equals a,t,g, or c
  misc feature (983): n equals a,t,g, or c
  misc feature (1471): n equals a,t,g, or c
aatggaagaggtcagaggagtaatattattggaaacagctgtaataggtgccataaaaagcaaacaaacaaaagtattttggttctttgcgaccacagctgtccccaaatatacagatgattcgcacttattttaaaatgaatctgggtattgctaatacccccaaattagcagtttttaattttaaaatacatgaggaaatgggactttgtcttgtctccaaagcagtgcatctnaaaatctacacccccacggttagrtgagttattactgagragttattgcacccacaaaaargctgccatttttttccaaagatgtcaaaagctagaaggccaggtcttctcaaagtaaaatacactgtgtattggggaaaaaagggtaagaggcataattaccaagttaggcatagtctgtcaagttgtatttagctattatcatggaatagtgttattccctgataatgaatgttggcatcataaccagaatgattattctcatctccatatcttcgtatttacatctaggaaatataaagcttatttatagtgaacactgagagtggtctctctccaaggagtaaagtaaatatgccctggctaactagtgtaagtttgtattctacataattaaccattataagaagtcactgagtagatcctaacttaagggatatttgtttgtgtttgagtatttctcgtgtggtgtttctaagtttgaaaagtgttttataagcatagagcttatgtgtgctamtggggaacraagtcttcattttaaaggaaagagggttttctaagatggccatgaaatgagtgaaattctatttattgcctgaaagctaaagtggaatatgaaggcaagtctttctgamcagagcagtcctgtcactgactamcccaggraaaggmcagggaaaagctagaaagtgttttgaaaactcttctgcttaccttttgaattgggcattaccaaagtaaggnccatttatgtgactggcttcctttggttagttatgattcattcattaattaattcatcagatttatatagagcacctgccatgagccaggcattatactaggtgtttgggaaacattggtaaacaaaagcaaagatccctgcttttatggaacttaagatattctgagacactggatcatacattctagtgcagtcaccttattaaaacttaagattttgtgatgcaaacaaacagccagaagctacaaataatgtaaatgttatatttaaaaaatacaatttcmaagaaatgacatttaaaccagttttaggaaagctgaagacaatactgcttttagagctttttaagatcagtttatattgctcttaaatgataatcctcagcttccaagtttttgtgaactcactttggtttatgtgtttgctacactcactgagaaattaaacaccttgcttgatttattgtaaaaaggaaaaaacaacaganccatacttaagcagtcttaaacttatttattaacgttatcttgagtctacagagaacagaaagctatctaagaggtagaaagctgtcaaatacctattatcaaaytctgaattctcctataatatttcataaagctattataacaccttaataccttactgtcagtgtctgtttgcagcctttccacatttcttctacataattgamacagtcttgatattcttttgccattgggactgcttgtcagacacacttcattkcagccttttattggctatttggaaaggaagcaaggggtacagtgggggcgcacrcaggcctggagtctggytcattctccagaatagaaataaaaccccccagtctctgcctttaatgccttccatccagttgttttgctgtatctcatgcctcctttttaaaaaactgccttaattttctaatctttctcatccccaaacacatataatctagtgaatcacatcatttccttgcataactataaagattatcctttcccaaaagcctttttataagtgccacctaacacattcatgggctgcttccctgggccatctggtatatgatttatgaatttactcattttactatgaggattattagcaagtaaaattaggaaggttatcccaactcctaaaaaagttatacaaaaataaaatgatcttgtatcaagaataaaaataactattcactatttaggattattcacacacacacacaccytctatacaccactaaagcctcccattaaacccatagaagacttaaagagctaaaagaggctataatataaaaaaaaaaaaaaaaaagggcggccgc

SEQ ID NO: 245 - DNA, 4065 bp, Homo sapiens
gtgggcgrggtggggtggggagggaggaaagggtaggaagggtgggaagggagaagcagacatagtcatttatgatttgaaagttggaaatttgtaccatctgtttgagtatatgcacatttaaaaaatatcatatagtaaatgcaaacatgccaagtattttataaagattaataacagacctactcttacctggcagtttacttaacttactgttttgagtcctaaacttagagttgttaatgcttatatataatctaaccaaagagttacccagtagggttttagtttttgaacttttattttcttgttgattataaatcctgattttggaatctattgcgcaaaagaagtttcattttggttacttagacctaagatcacttattaaaaatccttattttctccaagcccagcaaacgttgacttctgggcaaacctgaaaacctgaaaatgccactttcatgcagtttgtttgaagttaagtggaatcctttcaaatgacgagctgcagagaactcagcaccaagggctgcctatctgtagatagctgtaaaatggaatatttttaaatgaaggcaaataagtacttaaaagtgagctgagcaataaaatggtccaataataggtaaatgcaacagaaacagaaggagacctggttgccttatgcctttactcttacatggaataaattcccaatgcatatcctatgtaaaccataagtgaagggaaataaacctcgtcatgctccatgctgtgaggtgtcctttggatattctgtgatgacagagaagcctattttgttttgttttcagcatctttctctgatgtacgtttttaaggattttgtaagagctgttttcagtgtttaaattagtgctatttttccttgtttttaaaaatgaatctcgtactgtatcttactatgtccatacagatgttacaaatcgacagttttattcttagactcatgtgatccaagctgtatataccatatataaacattttacatgaatcatttagttttttaattcatttactaatgctataaaatttcctatattaccccagtaatttgcatcagctggtttatatactaaagcaacatgttttgatgagtttcttacatccttatcgaggaattgggttaggaaaaaatacataattgtaaaactgagtttgctgtattatactttttttcttgagtattagttgtattactaatcatatgttgattaactgtctacttaaagtcaaggtacctgtatttttaatccactaatttttttttagttgggaaatagatttcaggtcttttattagactaacattttttgagaagtaaaattgacttcatatacaaagcctgtaattttaggcgaaatggaagcagaaatctaggaagttgtgcttgcttgtatgttgagtttggtctcagactaagtaatgcatcagaattcatctgtttgaagcctgaaataatttaggactctgattcactgaccaaaagtcagtgttgcagagatttctctaccccgtatggtattttgttagattgttcaacaggaagcacatgattgagaacatcttgggacagaccaaaaccactgacagatggcaaggctcggcgattctgatttcccttctcaaatctgctcaactccaagagtcttgagaaactgctaaaattttgcctctgtcactcaagtcttacaaatgttatcttgtaaacctttgaggtgaactattccactgtcttgtacataggcatcttattcactgcaccctgtcacacccagcaccccccgccccgcacattatttgaaagactgggaatttaatggttagggacagtaaatctacttctttttccagggacgactgtcccctctaaagttaaagtcaatacaagaaaactgtctatttttagcctaaagtaaaggctgtgaagaaaattcattttacattgggtagacagtaaaaaacaagtaaaataacttgacatgagcacctttagatcccttcccctccatgggctttgggccacagaatgaacctttgaggcctgtaaagtggattgtaatttcctataagctgtaatagtggaggtattgtgggttcatttgagtaagccctccaaagataccattcaaataacctgggagaatgtcataaattattcagataattaacactgcatgaatctgattcagaggcatgcatttacatatgttgccctaattaccatttgatgatcataaatacaagtgaatgacattggacttttagtaacaaacttaatttttaaaaaggtgtagacaatggtggttaaaaaaaaaaaaaaaacaggtaccaggttctgtgtgtttgcaccaagtaattgacatgttttttgtttaatacatgtggaccatgaacagtattcattctmctttttcaaatgatatgctgtagaaaatattccttgaagatgtgagatttaaaaatttttccctttcaatgttgttttaattgtatttcttacttggtttttttgattgatagcacagtgataaatcataatactagacaaaattgtcttctctttcaaaccagagccatatatatgtctgtatatatgggacctactgcttctctgaggaaatgcataatctgttaatatcagacaaaatgagcaattggcagtgctcataatatattccaatttttattggaattttcgatggaatgttatttcaataaagccatgtaaggtgaaactttgataactttttactcttcaagttagggtaaattctgatccaatattcaattcatttgtgtactcccacatgcaaaatgctaaattacaatgcagacattaagaaaaagtattgactggaggggttgaattccttgagaatttattttatagtctaaatcacaaatactttactcaatttagtttttaaaatagtaaactgaatatttttgttgtaagcctatcagagtcaatccttcgtttggaattgttttcctgtttttccttactataaatcatttaaaaactgaattcattttcttagatggcataagtctgtctcttgagaaataagtaaaatactcctattttcagtatctgtagcacctgaaataggtctttgtatagccagaaacaagttatgttgaagttagcttttctttgtcaacagttttggacaataaaaatctgaaagtattaacacttgattttctactggggcccttcaaacttggttggaagaaattcaaccagaatatctacattagagtataatcatgtgtggtaggaagatggactagttaatcaagatttgttgtcacttaaattttttgtgatttttttccaagccagtttttttaaattctaaatgtgttttgaggtatgggtacattaattgtaatgtaaactattatacaactgtttttgcgactttataggcaggtaaattttgctattactattgaatacaaatgacaattcatttatgaccactcaaacagcgttagtaaccatttagtgacaaaggattaaaacatccatctggatgttaattttgaagatgtaaattatatgttgtttaaatttttccaggcatctgaaaaccttatctgctagacaatgtaagattcacacagagttatctgggattctgattttttaaatagtacatatcattaaaccattttctctaaatgtaagaagagcagaaaaaatcttataagattatcagatttttctaatgacacagaaatgtaagaaaaaaatccctttatattgaaaaaagatgcagtcaaagtcttttcagacatgcccaaactttgagaatttcttcaaccatctaatgctataaagatttttgttcttcctgttcacaaccagttgtataacagaaatactagctactgttttccttcctgtgtgtgaagtaatgaatcattgattatgtgacttgttatgtattcaattaaacactaaagaataaaacattcactcctttaaaaaaaaaaaaaaaaaaaaaaaaaaaaaaaaaaaaaaaaaaaaaa

SEQ ID NO: 246 - DNA, 1485 bp, Homo sapiens
  misc feature (635): n equals a,t,g, or c
cgtggttcgatgggaaggatctttctccaagtggttcctcttgaggggagcatttctgctggctccaggactttggccatctataaagcttggcaatgagaaataagaaaattctcaaggaggacgagctcttgagtgagacccaacaagctgcttttcaccaaattgcaatggagcctttcgaaatcaatgttccaaagcccaagaggagaaatggggtgaacttctccctagctgtggtggtcatctacctgatcctgctcaccgctggcgctgggctgctggtggtccaagttctgaatctgcaggcgcggctccgggtcctggagatgtatttcctcaatgacactctggcggctgaggacagcccgtccttctccttgctgcagtcagcacaccctggagaacacctggctcagggtgcatcgaggctgcaagtcctgcaggcccaactcacctgggtccgcgtcagccatgagcacttgctgcagcgggtagacaacttcactcagaacccagggatgttcagaatcaaaggtgaacaaggcgccccaggtcttcaaggtcacaagggggccatgggcatgcctggtgcccctggcccgccgggaccacctgctgagaagggagccaanggggctatgggacgagatggagcaacaggcccctcgggaccccaaggcccaccgggagtcaagggagaggcgggcctccaaggaccccagggtgctccagggaagcaaggagccactggcaccccaggaccccaaggagagaagggcagcaaaggcgatgggggtctcattggcccaaaaggggaaactggaactaagggagagaaaggagacctgggtctcccaggaagcaaaggggacaggggcatgaaaggagatgcaggggtcatggggcctcctggagcccaggggagtaaaggtgacttcgggaggccaggcccaccaggtttggctggttttcctggagctaaaggagatcaaggacaacctggactgcagggtgttccgggccctcctggtgcagtgggacacccaggtgccaagggtgagcctggcagtgctggctcccctgggcgagcaggacttccagggagccccgggagtccaggagccacaggcctgaaaggaagcaaaggggacacaggacttcaaggacagcaaggaagaaaaggagaatcaggagttccaggccctgcaggtgtgaagggagaacaggggagcccagggctggcaggtcccaagggagcccctggacaagctgccagaagggagaccagggagtgaaaggatcttctggggagcaaggagtaaagggagaaaaaggtgaaagaggtgaaaactcagtgtccgtcagattgtcggcaktaktaaccgaggccsggctgaartttactacatggtacytgggggcatttkcsatgaccartggcmaawttctgatgccattggcttctggcgcatgctggttaca

SEQ ID NO: 247 - DNA, 1486 bp, Homo sapiens
  misc feature (146): n equals a,t,g, or c
  misc feature (1447): n equals a,t,g, or c
  misc feature (1449): n equals a,t,g, or c
  misc feature (1472): n equals a,t,g, or c
ggtcgcgcgtccggaaattcccgggtcgacccacgcgtccgacggagcagatccggcaggaccgcagcaagggcaccgtccacttcgccgtggtcatcaccgacggccacgtcaccggcagcccctgcgggggcatcaagctgcangccgagcgggcccgcgaggagggcatccggctcttcgccgtggcccccaaccagaacctgaaggagcagggcctgcgggacatcgccagcacgccgcacgagctctaccgcaacgactacgccaccatgctgcccgactccaccgagatcgaccaggacaccatcaaccgcatcatcaaggtcatgaaacacgaagcctacggagagtgctacaaggtgagctgcctggaaatccctgggccctctggccccaagggctaccgtggacagaagggtgccaagggcaacatgggtgagccgggagagcctggccagaagggaagacagggagacccgggcatcgaaggccccattggattcccaggacccaagggcgttcctggcttcaaaggagagaagggtgaatttggagccgacggtcgcaagggggcccctggcctggctggcaagaacgggaccgatggacagaagggcaagctggggcgcatcggacctcctggctgcaagggagaccctggaaaccggggccccgacggttacccgggggaagcagggagtccaggggagcgaggagaccaaggcggcaagggggaccctggccgcccaggacgcagagggcccccgggagaaatcggggccaagggaagcaaggggtatcaaggcaacartggagccccaggaagtcctggtgtgaaaggagccaagggcgggcctgggccccgcggacccaaaggcgagccggggcgcaggggagaccccggcaccaagggcagcccaggcagcgatggccccaagggggagaagggggaccctggccctgaggggccccgcggcctggctggagaggttggcaacaaaggagccaagggagaccgaggcttgcctggacccagaggcccccagggagctcttggggagcccggaaagcagggatctcggggagaccccggtgatgcaggaccccgtggagactcaggacagccaggccccaagggagaccccggcaggcctggattcagctacccaggaccccgaggagcacccggagaaaaaggcgagcccggcccacgcggccccgagggaggccgaggcgactttggcttgaaaggagaacctgggaggaaaggagagaaaggagagcctgcggatcctggtccccctggtgagccaggccctcgggggccaagaggagtcccaggacccgagggtgagcccggcccccctggagaccccggtctcamgamtgtgagaaagcgctgttgcgccctggaagtggtctttcgtcattcgacagctccganancattgggtacaacaaatttaaantgggagaagaactt

SEQ ID NO: 248 - DNA, 1994 bp, Homo sapiens
ggtagcgtccccaggggtgggtaaggaggccccccatcttgggctgagctagggctagggccgtggggagggatagagacccacttgcaggccgagaatgagggcaacagtgggaacagctgccccatctccagccttggccaaccctggggaggggtcctgagcaggcagacttagcttgttgagcagagtgggaaggctttgctggggccacacatctcagagaaggccgagctgggttcctgcctccgctccctccagggccagcccaggagactggctgtgcccagcaggcccctctctgcagatgtcaacgagtgtctgaccatccctgaggcctgcaagggggaaatgaagtgcatcaaccactacgggggctacttgtgcctgccccgctccgctgccgtcatcaacgacctacayggcgagggacccccgccaccagtgcctcccgctcaacaccccaacccctgcccaccaggctatgagcccgacgatcaggacagctgtgtggatgtggacgagtgtgcccaggccctgcacgactgtcgccccagccaggactgccataacttgcctggctcctatcagtgcacctgccctgatggttaccgcaagatcgggcccgagtgtgtggacatagacgagtgccgctaccgctactgccagcaccgctgcgtgaacctgcctggctccttccgctgccagtgcgagccgggcttccagctggggcctaacaaccgctcctgtgttgatgtgaacgagtgtgacatgggggccccatgcgagcagcgctgcttcaactcctatgggaccttcctgtgtcgctgccaccagggctatgagctgcatcgggatggcttctcctgcagtgatattgatgagtgtagctactccagctacctctgtcagtaccgctgcgtcaacgagccaggccgtttctcctgccactgcccacagggttaccagctgctggccacacgcctctgccaagacattgatgagtgtgagtctggtgcgcaccagtgctccgaggcccaaacctgtgtcaacttccatgggggctaccgctgcgtggacaccaaccgctgcgtggagccctacatccaggtctctgagaaccgctgtctctgcccggcctccaaccctctatgtcgagagcagccttcatccattgtgcaccgctacatgaccatcacctcggagcggagcgtgcccgctgacgtgttccagatccaggcgacctccgtctaccccggtgcctacaatgcctttcagatccgtgctggaaactcgcagggggacttttacattaggcaaatcaacaacgtcagcgccatgctggtcctcgcccggccggtgacgggcccccgggagtacgtgctggacctggagatggtcaccatgaattccctcatgagctaccgggccagctctgtactgaggctcaccgtctttgtaggggcctacaccttctgaggagcaggagggagccaccctccctgcagctaccctagctgaggagcctgttgtgaggggcagaatgagaaaggcaataaagggagaaagaaagtcctggtggctgaggtgggcgggtcacactgcaggaagcctcaggctggggcagggtggcacttgggggggcaggccaagttcacctaaatgggggtctctatatgttcaggcccaggggcccccattgacaggagctgggagctctgcaccacgagcttcagtcaccccgagaggagaggaggtaacgaggagggcggactccargccccggcccagagatttggacttggctggcttgcaggggtcctaagaaactccactctggacagcgccaggaggccctgggttccattcctaactctgcctcaaactgtacatttggataagccctagtagttccctgggcctgtttttctataaaacgaggcaactggaaaaaaaaaaaaaaaaaaaaaaaaaaaaaaaaaaaaaaaaaaaag

SEQ ID NO: 249 - DNA, 1661 bp, Homo sapiens
  misc feature (810): n equals a,t,g, or c
  misc feature (1627): n equals a,t,g, or c
  misc feature (1630): n equals a,t,g, or c
  misc feature (1633): n equals a,t,g, or c
  misc feature (1648): n equals a,t,g, or c
tcattgatgccagagtgccacaccatcccatgcttgctgtccccatggtccgagtggagtgactgcagcgtgacctgcgggaagggcatgcgaacccgacagcggatctcaagtctctggcagaacttggagactgcaatgaggatctggagcaggtggagaagtgcatgctccctgaatgccccattgactgtgagctcaccgagtggtcccagtggtcggaatgtaacaagtcatgtgggaaaggccacgtgattcgaacccggatgatccaaatggagcctcagtttggaggtgcaccctgcccagagactgtgcagcgaaaaaagtgccgcatccgaaaatgccttcgaaatccatccatccaaaagctacgctggagggaggcccgagagagccggcggagtgagcagctgaaggaagagtctgaaggggagcagttcccaggttgtaggatgcgcccatggacggcctggtcagaatgcaccaaactgtgcggaggtggaattcaggaacgttacatgactgtaaagaagagattcaaaagctcccagtttaccagctgcaaagacaagaaggagatcagagcatgcaatgttcatccttgttagcaagggtacgagttccccagggctgcactctagattccagagtcaccaatggctggattatttgcttgtttaagacaatttaaattgtgtacgctagttttcatttttgcagtgtggttcgcccagtagtcttgtggatgccagagacatcctttctgaatacttcttgatgggtacaggctgagtggggcgccctcancttccagccagcctcttcctgcagaggagtagtgtcagccaccttgtactaagctgaaacatgtccctctggrgcttccacctggccagggaggacggrgactttgacctactccacatggagaggcaaccatgtctggaagtgactatgcctgagtcccagggtgcggcaggtaggaaacattcacagatgaagacagcagattccccacattctcatctttggcctgttcaatgaaaccattgtttgcccatctcttcttagtggaactttaggtctcttttcaagtctcagtcatcaatagttcctggggaaaaacagagctggtagacttgaagaggagcattgatgttgggtggcttttgttctttcactgagaaattcggaatacatttgtctcacccctgatattggttcctgatgcccccccaacaaaaataaataaataaattatggctgctttatttaaatataaggtagctagtttttacacctgagataaataataagcttagagtgtatttttcccttgcttttgggggttcagaggagtatgtacaattcttctgggaagccagccttctgaactttttggtactaaatccttattggaaccaagacwaaggaagcaaaattggkctctttaagagacccaattttgcctaaatttttaaaatcttcctacacacatcttagaccgttcaaagtttggcaaaatcargttttttaagcaaggaaaaaccattttttggctttttccaaaacaatttttggcttaaagtccttggccccaaaagccccccccccaaatggcaanttnccnttttaaaccaaaaanttcccaattcttt

SEQ ID NO: 250 - DNA, 2358 bp, Homo sapiens
  misc feature (292): n equals a,t,g, or c
ggcagagcactttccgcctggtaaatacaggatatcctgtccagggcaagaatctgatgcaggagaccgggtgatggtgttgaaccggtcagggatgtggcaggaagaggtgactgtgccctcggtccagaccttcctgattcctgaggccatgacctttgaggaagctgctgccttgctcgtcaattacattacagcctacatggtcctctttgacttcggcaacctacagcctggccacagcgtcttggtacacatggctgcagggggtgtgggtatggctgccgtgcanctgtgccgtacagtggagaatgtgacagtgttcggaacggcctcggccagcaagcacgaggcactgaaggagaatggggtcacacatcccatcgactatcacacgactgactacgtggatgagatcaagaagatttcccctaaaggagtggacattgtcatggaccctctgggtgggtcagatactgccaagggctacaacctcctgaaacccatgggcaaagtcgtcacctatggaatggccaacctgctgacgggccccaaacggaacctgatggccctggcccggacatggtggaatcagttcagcgtgacagctctgcagctgctgcaggccaaccgggctgtgtgtggcttccacctgggctacctggatggtgaggtggagctggtcagtggtgtggtggcccgcctcctggctctgtacaaccagggccacatcaagccccacattgactcagtctggcccttcgagaaggtggctgatgccatgaaacagatgcaggagaagaagaatgtgggcaaggtcctcctggttccagggccagagaaggagaactagggcaagtggctgtgagaccctagagaccagcgaagggagaagttgggaagctacgttctgttggccaccagacttgcatttcagcctctgtcataatgctctgccctccctcccccgaagttctctgtggtgatgaccgctctcccctgcccctccccgcttcctgacctctgaagaggttgggaagtgaccatttggatgtctgggccctgccaaggcgacagggagggtcagagggaggccggctgcttcctgcccccaccctttccccgggcctgctgtgctgcttttgtgccaaggttagccagtcccccctgttgtgttccatgtgctttcacctctgcctcatctttcctcccgtccctgccccgccacctccccaaagaattgaaacgtcagctcaggatatggggccaatctctgtgagtccagcatgtacctgtctctccctagtgtcccttcagcctgggctgaccagtgcccgcctctgggcttgaccagttcccaatctcgtcctctgtccccaacttcttaagcacaattgggcttcttccatctccaggttttctgccattcttaaccaaggctgcctcttccaacagggcgggaatcagacctactcccctaggtcacaactctgggaaggatacagagcccccacccttcactgagttctctggatttgttctcagtgccttagcaacgaaaacctgtgcttgtgtgtgtgtggcggcggggagggaggatcctgtttcccacctccttctcctcccctgtactccccagtgccttccttgttctggtggagctggggtttctctcctccccagtcccacaacactgccaaaaatctgtgtatgtgccattgggtggggcagccccaagcctcctggggaggcagggcaaaaacaggtgccctcatcgtggtctgtgccatgtcccgtctctatggtggttgaggagaaaggcggggaagcttcctcagccttgcagatatgtgtggcatttactagccagagctctgaaaggcagtgctgtctgtttcttgtactgggaccaaagtaaaaatccaagcacattccccttgcagttaggggaggccctactgccttctcaaagcagagaggcagcttatcaaactcagcccaaaactctgtttacatgggtggggagatggagcagggaagtacagagtgggatggtcaggacctgggccattgcaaccaaaatggggacttcctgggtagggaggtcactccctctactcactgagctaggattagggagggttattgccccaaccattgcaatgggaggtggagggacaggctcagcctcctcattgtctaaatgaggcctaaatgtgtgaagtgcgatttctgcttttgtgtaccccaccaccccattaccacagctgcctttgtgtgtttgtgtcaataaaaagccaaaccctgaaaaaaaaaaaaaaaaaaaagtcgaccgccgtttatttagtagtagtaggc

SEQ ID NO: 251 - DNA, 697 bp, Homo sapiens
  misc feature (667): n equals a,t,g, or c
gcccacgcgtccggcgagaagacgacagaagggcgggttgaggagaggctccagacccgcacgccgcgcgcacagagctctcagcgccgctcccagccacagcctcccgcgcctcgctcagctccaacatggcaaaaatctccagccctacagagactgagcggtgcatcgagtccctgattgctgtcttccagaagtatgctggaaaggatggttataactacactctctccaagacagagttcctaagcttcatgaatacagaactagctgccttcacaaagaaccagaaggaccctggtgtccttgaccgcatgatgaagaaactggacaccaacagtgatggtcagctagatttctcagaatttcttaatctgattggtggcctagctatggcttgccatgactccttcctcaaggctgtcccttcccagaagcggacctgaggaccccttggccctggccttcaaacccaccccctttccttccagcctttctgtcatcatctccacagcccacccatcccctgagcacactaaccacctcatgcaggccccacctgccaatagtaataaagcaatgtcacttttttaaaacatgaaaaaaaaaaaaaaaaaaagggggggcggttarargatccaagyttacgtaccgcgtgcatgcgacngtcatagctttttctataagtggtcaccct

SEQ ID NO: 252 - DNA, 2958 bp, Homo sapiens
  misc feature (2286): n equals a,t,g, or c
  misc feature (2917): n equals a,t,g, or c
  misc feature (2934): n equals a,t,g, or c
cagagaacatctcaacagtgccagtaaaatagctctcctagacttgagcttccagccaggcatttagatcactcttaagcctttgtggaattctgaggaaaaaaagcaagatgcctcaatgccaatgctgggccataagattctactcccctccctgtaggktggggcgcgtggctcagctttggaaaatcattttgccagtaatattgcctgtgaatccctttaagaagtcgtcctgatctgagcctgtctttctgagcactttggtgctgaattgaaaatggtaagctaaagcagtgacagatccacgtagcctctttaacctctttattatcttgccaaaaaaaaagtttctcaggttaaacctttgtctttaacctccctttgttgtggagaaaatgtgtcactaatcagtggtccaagggatatctagctttggttactcagttcctgcagcataacagatatgacttatgccagggaaggtagaggctgattatggagacacccaggaacaggaataagaagggataggtctgctccacgtagaacctccccagatcggaagttaagtcttggagagtttccaaagtgctgaagtaaaaaggagacttggagggcctttgcttaatgagcaagaggcttgtgtcctcccaagaacatgagggagttcagaagggagctatagctcacagacagaaacctgcccgctcaccccatccctcgtgactgggagcatgtttgctcagaattttctaagaggactctcccttcaaaaatccaatttgctcccagaatgttgtttagcctctgagaatctcactctttcatttccatctgtgaatggacatagatgtgttgctcagggatcagaaacatcagagtccagggcccagtggcatggtgttgcattagtagttagaaaagtaattggtcagctctactgtaaaagaaataagtatgtagtacagttttgtaaatgtcaggtctgttctrttgttttgtgatctgaagactgtcaaactggttgataatcaaagaaaaggttggtggttagaataagtaaaatttcagttagaaagatatagcttaccagttttccatgtgcttaaggaagtcaagaatatttcaggttgttgagaactgttgtaaaatggaattgaagctagtgtctctcaccttcttaggtgtatcagagagaggaagtggaaggccagtagtagcatcttcatacttacttttgccagcccagcctccatttcaaagactttgtcttccatcctatccaatgacatggtcagggatgggctctgaggaggcagtgaggccccaccttggtttgctccactgtggtgtgtagtctccaaacagcttaagggtttttaagttttctcacgattacctccactccactcatctactatcagcatcagaaaggttaacatccctgggaccattctacttataaaagagatgaactagtgtgctttctccccttttccaggtgtgccatccatatacaatctcctcttggccaagttcaacaaatgtttccagggaaccccgtgggttgaggcaaagtagccaagatgtattgagttaagtttttctagaggacaaaagtatttcttgtcccttttccctcatgctcatatgttttagctgaggcgtaaatggccaagttgagtaatatctgtggaactgagacagagagccagggacccatgtacccagggaccagtcccctggggaatcacacagtggctcagactagactgctctatcccaccagaactctgctgctgttcatttccatcaggaccacccaggaaagcaaataagttagccttctcatcattaggtcacctaatctcttgggttgcaggatgagagcatatatagatctcctgtttagagagtgtgttcataattgtagaaagggatagaaaatggaataaccaagaggctgtgtcattttttaagaggatggcaaggatgacctcaaatgagctcaacaaaactgggaatccaaggaatggtgcttgtagggaaagagaggtcagttgtggtccttaaacctcttggcaccttgtgcgggttataaaacaaggagctggagtaaaattgcccttacccccaatccaaatgctgtccaggatttaggagctacccaacctgtggttatatggtgttggtttccattttttgtttgtttgcttgtttccaaaatagccttgcttggtactgcatggaaagttcaagcttttcttcttgcccgctcagggntggcctcttccccgtgtcttcacagcgtccctaaggaagatttttgcagcactctctggagctgaggggagtgaaatttggtccagagaaggcggaaggaaatagttttcctgtttccttttctcgaggtggatgtcctcaggcttccttcacacctccttctcatgggtgcggctggcagtacagtcaggctgtggaggagggctgagaagaaaggggcactggtccagccccaggtttggtctgagacaggtacacagcagataccatcccaccttcctctctaaagaacaggccagccacacatataaccctttccctactttactaatgtatcccttatgtggtaccagcaatggaggacaggcagacttaccccctgccatctagagagaatgttgttattacccgtaaaacttgaccacccccatatcccactcctttttgtaaaaacaaatgcttaaacctgtgagcctgccgttcctttctatgtgttaatcagtttccttccatttgagctgtgtgggagggaagggcattgaaattgtaggttgtaatcttgtgccaaccaataaaaaccagtatttcacacacaaaaaaaaaaaaaaaaaaatcccggggggggcccggnacccatttggcccaaangggggggttttaaattcccgggcc

SEQ ID NO: 253 - DNA, 2527 bp, Homo sapiens
  misc feature (2171): n equals a,t,g, or c
agatgcttccgattattaagagttacagaacgtttttaaactcgagaagctgaggagaaagagaaggaggggattgtaaacaagactcactggtgatcaatctaaaccggagtaatccgaaactgaaagatctatacattcgcccaaatattgcccaaaagaggatgcaaggctcactggaggcccatgtcaatggcttccgcttcacatctgttcgaggagacaaagtggatattttgtacaataatattaagcatgctttgttccagccctgtgatggagaaatgattattgtcttgcactttcacctcaagaatgccatcatgtttgggaagaagcggcacacggatgtgcagttctacacagaagtgggagagataaccwcggacttggggaaacatcagcatatgcatgaccgagatgacctctatgctgagcagatggaacgagaaatgaggcacaaactgaaaacagcctttaaaaatttcattgagaaagtagaggctctaactaaggaggaactggaatttgaagtgccttttagggacttgggatttaacggagctccctataggagtacctgcctccttcagcccactagtagtgcgctggtaaatgctacggaatggccaccttttgtggtgacattggatgaggtagagctgatccactttragcgggtccagtttcacctgaagaactttgatatggtaatcgtctacaaggactacagcaagaaagtgaccatgatcaacgccattcctgtagcctctcttgaccccatcaaggaatggttgaattcctgcgacctgaaatacacagaaggagtacagtccctcaactggactaaaatcatgaagaccattgttgatgaccctgagggcttcttcgaacaaggtggctggtctttcctggagcctgagggtgaggggagtgatgctgaagaaggggattcagagtctgaaattgaagatgagacttttaatccttcagaagatgactatgaagaggaagaggaggacagtgatgaagattattcatcagaagcagaagagtcagactattctaaggagtcattgggtagtgaagaagagagtggaaaggattgggatgaactggaggaagaagcccgaaaagcggaccgagaaagtcgttacgaggaagaagaagaacaaagtcgaagtatgagccggaagaggaaggcatctgtgcacagttcgggccgtggctctaaccgtggttccagacacagctctgcaccccccaagaaaaagaggaagtaacttctgaactttggccctgagctccattcttcctccagccaacccctgaaaattttacatgacatagaaactgtatttttcctttcgttttcatttgaagttttgccatttgtgtttatgggtttagggggccatttgtgtggaccaatctactcggggaattccaggcccaccaggacacgtgccaatggccccattcagatggcaagggaggaggtgttcttgaagacaggaggaggctcccgctgttaataaatattgtttcattcttctctcttcctgtcaccttctgccaagacattgatggcttctgacatcttatttggtgtctcaaagctgtatttccaagacagtggtacaaggtgacccttaattacccgtatcatggttcttgaccagcacattcaatcctccaacctaccctactgccatgaccttccgcacatctctaagttttatctttgcaatactcaaggttctcggaaatttgctaatggttgtgataaaccatacagcttgagccagtgaggcagattgggctggtgccttcgtctgagttttcctgctttcctgcctcgtgcagattctgaggtatatctgctgccttggaagacataagaagcagtgatactccctggctcggttattttctccatacaatgcacacatggtacaatgatagaaggcaaaattgccactgtcttcttttttttctcatatatctaaggaagatatatcaggttgtgcctcatgtaccgcttctagtgaaatgtagaggaaggctcaaaggagtcaacatttagatctggaagggacaagtcatgccttgggcctagaataccctgatgagaaaagagaagaggaagggaggccatatctacaacacancctctcggcactgctgctccttattttaactttgtcttgcattgtcctgtatttatcacagtttctgttgaacagcttttcaagtatttggggagtttatcttgccatcctccccttctggttctctgcacccacctgtcccactgcagttccttccgtgctctgtgactttaagagaagaaggggggaggggtcccggattttatgtttgtttgttttttctccttagcagtaggacttgatattttcaattttggaagaactaaaagatgaataaactgggttttttttgttgtttgtttttgtaaaaaaaaaaaaaaaaaaaaaaaaaaaaaaaaaaaaaaaaaaaaaaaaaa

SEQ ID NO: 254 - DNA, 1183 bp, Homo sapiens
gaatacccagggtcttatttttgtggtagatagcaacgatcgtgaaagaattcaggaagtagcagatgagctgcagaaaatgcttctggtagatgaattgagagatgcagtgctgctactttttgcaaacaaacaggatttgccaaatgctatggccatcagtgaaatgacagataaactagggcttcagtctcttcgtaacagaacatggtatgttcaagccacttgtgcaacacaaggaactggtctgtatgaaggacttgactggctgtcaaatgagctttcaaaacgttaaatgaaattggatatctaaccaaggacatgtttgataaaattggtctaggcttgttacaacaaaattagtttgtatcttggttattaaacagtatctgggactggtttgggcagaatattaaacttattttgttgccaattattgtttaccgagtataatgttgctatttagcaatgtgcttggttttaaagaaattctccttgggaaaaaagtatcctcttttaattttacttcccataagcgtaaatgcctggacatagctcttgtgcaacctttaaataaattgttttgagtgttttttgagccccagacaaataatgttttaaagttatccccttgctactttactgatacctttatcattcctgagacagtttgctaatttaaaaatgtagcattccatttgtatttatttctctcccttgccaaaaagattttctaatactgcttgtaccagccagagaaagatccaaaacactactcagctctcttgcactgaggaaatttttccccctacattgactcctggcctacatcagccaaacttaaccttggtggggtttggatttgatagccaattagttctgtgctggttgcaaagaattgatatttagatggtttttaatactcagcagattgtcttcctttatattgtgtcttttttatgttgcatgttgcttttgttatcagcctgattttttgctcagtatatgatagttctgctgatgttttgtttattgggcagacatatcttcattaagagtttttggaaaactcatcaaattcgatgaatacattttcttcataacccatttggaattattcctaataaaatgataaaatacgtaaaaaaaaaaaaaaaaaaaaaaaaaaaaaaagggggggggg

SEQ ID NO: 255 - DNA, 2051 bp, Homo sapiens
  misc feature (2): n equals a,t,g, or c
  misc feature (50): n equals a,t,g, or c
  misc feature (68): n equals a,t,g, or c
  misc feature (2027): n equals a,t,g, or c
  misc feature (2046): n equals a,t,g, or c
cncctaagatgttccttatggctcaaggcttgaattgaaggtgggaaccncctgaagcctccgtgggnaggccttgcctgaggttaggtgtctggcatgagtgccgccggctgggtgtgatttaggtgaaggacatctgtaaaggagcgtgtcgcaacctctgttccttcttcacatctagtggtatcctgaggtgcggcaccactgtcccaacactcccatcatcctagtgggaactaaacttgatcttagggatgataaagacacgatcgagaaactgaaggagaagaagctgactcccatcacctatccgcaggtctagccatggctaaggagattggtgctgtaaaatacctggagtgctcggcgctcacacagcgaggcctcaagacagtgtttgacgaagcgatccgagcagtcctctgcccgcctcccgtgaagaagaggaagagaaaatgcctgctgttgtaaatgtctcagcccctcgttcttggtcctgtcccttggaacctttgtacgctttgctcaaaaaaaaamaaaaaaaaaaaaaaaaaaaaaaaaaacaacggtggagccttcgcactcaatgccaactttttgttacagattaatttttccataaaaccattttttgaaccaatcagtaattttaaggttttgtttgttctaaatgtaagagttcagactcacattctattaaaatttagccctaaaatgacaagccttcttaaagccttatttttcaaaagcgccccccccattcttgttcagattaagagttgccaaaataccttctgaactacactgcattgttgtgccgagaacaccgagcactgaactttgcaaagaccttcgtctttgagaagacggtagcttctgcagttaggaggtgcagacacttgctctcctatgtagttctcagatgcgtaaagcagaacagcctcccgaatgaagcgttgccattgaactcaccagtgagttagcagcacgtgttcccgacataacattgtactgtaatggagtgagcgtagcagctcagctctttggatcagtctttgtgatttcatagcgagttttctgaccagcttttgcggagattttgaacagaactgctatttcctctaatgaagaattctgtttagctgtgggtgtgccgggtggggtgtgtgtgatcaaaggacaaagacagtattttgacaaaatacgaagtggagatttacactacattgtacaaggaatgaaagtgtcacgggtaaaaactctaaaaggttaatttctgtcaaatgcagtagatgatgaaagaaaggttggtattatcaggaaatgttttcttaagcttttcctttctcttacacctgccatgcctccccaaattgggcatttaattcatctttaaactggttgttctgttagtcgctaacttagtaagtgcttttcttatagaaccccttctgactgagcaatatgcctccttgtattataaaatctttctgataatgcattagaaggtttttttgtcgattagtaaaagtgctttccatgttactttattcagagctaataagtgctttccttagttttctagtaactaggtgtaaaaatcatgtgttgcagctttatagtttttaaaatattttagataattcttaaactatgaaccttcttaacatcactgtcttgccagattaccgacactgtcacttgaccaatactgaccctctttacctcgcccacgcggacacacgcctcctgtagtcgctttgcctattgatgttcctttgggtctgtgaggttctgtaaactgtgctagtgctgacgatgttctgtacaacttaactcactggcgagaatacagcgtgggacccttcagccactacaacagaattttttaaattgacagttgcagaattgtggagtgtttttacattgatcttttgctaatgcaattagcattatgttttgcatgtatgacttaataaatccttgaatcataaaaaaaaaaaaaaaaaaaacccgagggggggccnggtacccaattcgccctanagggg

SEQ ID NO: 256 - DNA, 686 bp, Homo sapiens
gccgcacacagtgttggtggagttctcgtccgtggtagctgacacccaggagtatatcatcgagsccactgcggacgatgcggagaccagagaggccacggagatcatcgagggcacccagacagaggtggacagccacatcatgaaggtggtgcagcagatcgtgcaccaggctagcgccggccaccagatcatcgtgcagaacgtcaccatggacgaggagacggcgctgggcccagaggcggctgccgccgacaccatcaccattgccacccccgagagcctgacagagcaggtggccatgacgctgcctcggccatcagcgagggcactgtgcttgccgcccgggcagggacaagtggcactgaacaggccactgtgaccatggtgtcatcagaggacatcgagatcctggagcatgcaggcgagctggtcatcgcctcgccggagggccagctggaggtgcagacggtcatcgtctagcatgaggtctgcggggtcctggccgggcagggacagggcagaggactctgagcgccccacccatgcctgcctggcctggtagagaagatggcacaggatggaggcgccccaagacggacagtgtacataagagtttcttgttgctttacaataaaacatgagaacctgcaaaaaaaaaaaaaaaaaaaaaaaaaaaaaaaaaa

SEQ ID NO: 257 - DNA, 2322 bp, Homo sapiens
  misc feature (2319): n equals a,t,g, or c
ggccacgcagggcgtggtcacctactacctacaagaaagcggagtcatgccttatctgtctcagcttgggtttgacgtggtgggctatggctgcatgacctgcattggcaacagtgggcctttacctgaacctgtggtagaagccatcacacagggagaccttgtagctgttggagtactatctggaaacaggaattttgaaggtcgagttcaccccaacacccgggccaactatttagcctctccccccttagtaatagcatatgcaattgctggaaccatcagaatcgactttgagaaagagccattgggagtaaatgcaaagggacagcaggtatttctgaaagatatctggccgactagagacgagatccaggcagtggagcgtcagtatgtcatcccggggatgtttaaggaagtctatcagaaaatagagactgtgaatgaaagctggaatgccttagcaaccccatcagataagctgtttttctggaattccaaatctacgtatatcaaatcaccaccattctttgaaaacctgactttggatcttcagccccctaaatctatagtggatgcctatgtgctgctaaatttgggagattcggtaacaactgaccacatctccccagctggaaatattgcaagaaacagtcctgctgctcgctacttaactaacagaggcctaactccacgagaattcaactcctatggctcccgccgaggtaatgacgccgtcatggcacggggaacatttgccaacattcgcttgttaaacagatttttgaacaagcaggcaccacagactatccatctgccttctggggaaatccttgatgtgtttgatgctgctgagcggtaccagcaggcaggccttcccctgatcgttctggctggcaaagagtacggtgcaggcagctcccgagactgggcagctaagggccctttcctgctgggaatcaaagccgtcctggccgagagctacgagcgcattcaccgcagtaacctggttgggatgggtgtgatcccacttgaatatctccctggtgagaatgcagatgccctggggctcacagggcaagaacgatacactatcattattccagaaaacctcaaaccacaaatgaaagtccaggtcaagctggatactggcaagaccttccaggctgtcatgaggtttgacactgatgtggagctcacttatttcctcaacgggggcatcctcaactacatgatccgcaagatggccaagtaggagacgtgcacttggtgctgcgcccagggaggaagccgcaccaccagccagcgcaggccctggtggagaggcctccctggctgcctctgggaggggtgctgccttgtagatggagcaagtgagcactgagggtctggtgccaatcctgtaggcacaaaaccagaagtttctacattctctatttttgttaatcatcttctctttttccagaatttggaagctagaatggtgggaatgtcagtagtgccagaaagagagaaccaagcttgtctttaaagttactgatcacaggacgttgctttttcactgtttcctattaatcttcagctgaacacaagcaaaccttctcaggaggtgtctcctaccctcttattgttcctcttacgctctgctcaatgaaaccttcctcttgagggtcattttcctttctgtattaattataccagtgttaagtgacatagataagaactttgcacacttcaaatcagagcagtgattctctcttctctccccttttccttcagagtgaatcatccagactcctcatggataggtcgggtgttaaagttgttttgattatgtaccttttgatagatccacataaaaagaaatgtgaagttttcttttactatcttttcatttatcaagcagagacctttgttgggaggcggtttgggagaacacatttctaatttgaatgaaatgaaatctattttcagtgaaaacttgttgactttgaaaaaaaaaaaaaaaaaattgaggaaatcaaggacttcctgctcacagcccgacgaaaggatgccaaatctgtcaagatcaagaaaaataaggacaacgtgaagtttaaagttcgatgcagcagatacctttacaccctggtcatcactgacaaagagaaggcagagaaactgaagcagtccctgccccccggtttggcagtgaaggaactgaaatgaaccagacacactgattggaactgtattatattaaaatactaaaaatccaaaaaaaaaaaaaaaaaaaaaaaaaaaaaaaaaaaaaaaaaaaaaaaaaaaaaaaaaaanttt

SEQ ID NO: 258 - DNA, 2261 bp, Homo sapiens
  misc feature (2115): n equals a,t,g, or c
tggaagtaaattctagtttgtagttctcatttgtaatgaacacattaacgactagattaaaatattgccttcaagattgttcttacttacaagacttgctcctacttctatgctgaaaattgaccctggatagaatactataaggttttgagttagctggaaaagtgatcagattaataaatgtatattggtagttgaatttagcaaagaaatagagataatcatgattatacctttatttttacaggaagagatgatgtaactagagtatgtgtctacaggagtaataatggtttccaaagagtattttttaaaggaacaaaacgagcatgaattaactcttcaatatargctatgaagtaatagttggttgtgaattaaagtggcaccagctagcacctctgtgttttaagggtctttcaatgtttctagaataagcccttattttcaagggttcataacaggcataaaatctcttctcctggcaaaagctgctatgaaaagcctcagcttgggaagatagatttttttccccccaattacaaaatctaagtattttggcccttcaatttggaggagggcaaaagttggaagtaagaagttttattttaagtactttcagtgctcaaaaaaatgcaatcactgtgttgkatataatagttcataggttgatcactcataataattgactctaaggcttttattaagaaaacagcagaaagattaaatcttgaattaagtctggggggaaatggccactgcagatggagttttagagtagtaatgaaattctacctagaatgcaaaattgggtatatgaattacatagcatgttgttgggattttttttaatgtgcagaagatcaaagctacttggaaggagtgcctataatttgccagtrgccacagattaagattatatcttatatatcagcagattagctttagcttagggggagggtgggaaagtttggggggggggttgtgaagatttagggggaccttgatagagaactttataaacttctttctctttaataaagacttgtcttacaccgtgctgccattaaaggcagctgttctagagtttcagtcacctaagtacacccacaaaacaatatgaatatggagatcttcctttacccctcaactttaatttgcccagttatacctcagtgttgtagcagtactgtgatacctggcacagtgctttgatcttacgatgccctctgtactgacctgaaggagacctaagagtcctttccctttttgagtttgaatcatagccttgatgtggtctcttgttttatgtccttgttcctaatgtaaaagtgcttaactgcttcttggttgtattgggtagcattgggataagattttaactgggtattcttgaattgcttttacaataaaccaattttataatctttaaatttatcaactttttacatttgtgttattttcagtcagggcttcttagatctacttatggttgatggagcacattgatttggagtttcagatcttccaaagcactatttgttgtaataacttttctaaatrtagtgcctttaaaggaaaaatgaacacagggaagtgactttgctacaaataatgttgctgtgttaagtattcatattaaatacatgccttctatatggaacatggcagaaagactgaaaaataacagtaattaattgtgtaattcagaattcataccaatcagtgttgaaactcaaacattgcaaaagtgggtggcaatattcagtgcttaacacttttctagcgttggtacatctgagaaatgagtgctcaggtggattttatcctcgcaagcatgttgttataagaattgtgggtgtgcctatcataacaattgttttctgtatcttgaaaaagtattctccacattttaaatgttttatattagagaattctttaatgcacacttgtcaaatatatatatatagtaccaatgttacctttttattttttgttttagatgtaagagcatgctcatatgttaggtacttacataaattgttacattattttttcttatgtaatacctttttgtttgtttatgtggttcaaatatattctttccttaaamtntaaaaaaaaaaaagaagtgattgctaatgggttcaaggtttccttttgggctgatgaaaatattttaaaattagacagtggtaatgatttaagaatctgtaaatataactaaaaattactgaaaagaataaaatttatataatgtg

SEQ ID NO: 259 - DNA, 1374 bp, Homo sapiens
  misc feature (929): n equals a,t,g, or c
aggacttcagcaatttaggaaccacccatttgctgcgtcttacatccagtctgacgacaaaaggagcttcatctttcaagataacccgtggaattgaagcagttggtggcaaattaagtgtgaccgcaacaagggaaaacatggcttatactgtggaatgcctgcggggtgatgttgatattctaatggagttcctgctcaatgtcaccacagcaccagaatttcgtcgttgggaagtagctgaccttcagcctcagctaaagattgacaaagctgtggcctttcagaatccgcagactcatgtcattgaaaatttgcatgcagcagcttaccggaatgccttggctaatcccttgtattgtcctgactataggattggaaaagtgacatcagaggagttacattacttcgttcagaaccatttcacaagtgcaagaatggctttgattggacttggtgtgagtcatcctgttctaaagcaagttgctgaacagtttctcaacatgaggggtgggcttggtttatctggtgcaaaggccaactaccgtggaggtgaaatccgagaacagaatggagacagtcttgtccatgctgcttttgtagcagaaagtgctgtcgcgggaagtgcagaggcaaatgcatttagtgttcttcagcatgtcctcggtgctgggccacatgtcaagaggggcagcaacaccaccagccatctgcaccaggctgttgccaaggcaactcagcagccatttgatgtttctgcatttaatgccagttactcagattctggactctttgggatttatactatctcccaggccacagctgctggagatgttatcaaggctgcctataatcaagtaaaaacaatagctcaaggaaacctttccaacacagatgtccaagctgccaagaacaagctgaaagctggnatacctaatgtcagtggagtcttctgagtgtttcctggaagaagtcgggtcccaggctctagttgctggttcttacatgccaccatccacagtccttcagcagattgattcagtggctaatgctgatatcataaatgcggcaaagaagtttgtttctggccagaagtcaatggcagcaagtggaaatttgggacatacaccttttgttgatgagttgtaatactgatgcacacattacaggagagagctgaacgttctctcagcccagagcagcaaacacatgaaagtcagaagtctctaatatatcatttgtcttttttccagtgaggtaaaataaggcataaatgcaggtaattattcccagctgacctaaagtcaataaaacattctgtttaagtgttaaaaaaaaaaaaaaaaaaaaattctgcggccgcaagggaattca

SEQ ID NO: 260 - DNA, 1958 bp, Homo sapiens
  misc feature (1843): n equals a,t,g, or c
  misc feature (1915): n equals a,t,g, or c
  misc feature (1934): n equals a,t,g, or c
ggaaagacttggtaatggcgacgggtttgtcagagcaccataacatggtgtgggaagtgaagacaaatcagatgcctaatgcagtacagaaactcctgttggtgatggacaagagagcctcaggaatgaatgactcattggagttgctgcagtgtaatgagaatttgccatcttcacctggatataactcctgtgatgaacacatggagcttgatgaccttcctgaacttcaggcagttcaaagtgatcctacccaatctggcatgtaccagctgagttcagatgtttcacatcaagaatacccaagatcatcttggaaccaaaatacctcagacataccagaaactacttaccgtgaaaatgaggtggactggctaacagaattggcaaatatcgcgaccagtccacaaagtccactgatgcagtgctcattttacaatagatcatctcctgtacacatcatagccactagcaaaagtttacattcctatgcacgccctccaccagtgtcctcttcttcgaagagtgaaccagccttccctcatcaccattggaaggaggaaacaccagtaagacacgaaagggcaaatagtgagtcagaatctggcattttctgcatgtcctccctgtcagatgatgatgatttgggatggtgcaattcctggccttcaactgtctggcactgttttttgaaaggcacacgactgtgcwttcataagggragcaataaggaatggcaagatgttgaagattttgctagagctgaaggctgtgataatgaggaagatcttcaaatgggcattcacaagggctatggttctgatggtctaaagttgttatcacatgaagaaagtgtatcatttggcgagtctgtactgaagttgacttttgatcctggtacagtagaagatggtttacttaccgtagagtgtaagctggaccaccctttctatgttaaaaataaaggttggtcatcattttatccaagcttgactgtggtacagcatggcattccatgttgtgaaagttcatattggcgatgtatgtctacctcctggacaccccgatgccattaattttgatgattcaggtgtttttgatacatttaaaagctatgacttcacacctatggattcttctgcagtttatgtgttaagtagtatggctcgccagcgtcgtgcatctttgtcttgtggaggacctggtggtcaagactttgcaagatctggattcagtaaaaactgtggctcacctggatcatcacagctctcttccaattctttgtatgctaaagctgtcaaaaaccacagctcagggactgtgagtgccacttctcctaataagtgcaaaagaccaatgaatgccttcatgctttttgccaaaaaatacagagttgaatatactcagatgtatccagggaaagataacagagccataagtgtgatccttggtgacaggtggaagaaaatgaagaatgaagagagaagaatgtacacattagaagcaaaggctttggctgaagaacagaaacgtttaaatcctgactgttggaagaggraaagaaccaattcaggctcacaacaacattaaaccaggatgcttatgttcttaagtctatatttgcatatacattgactcttgatggaaagacttaagaagatcaaggtctcaccatttgtcctcaattcgtgtgaccataagatactgatagcattgagtcttgaaatgatttaataatatgagtgaggatttgctttctccattagagcmttaagctaaarctatccarcattttaaaccaaattggccttatttttcttcccaacttcatatatgtctatcngggtaataataggcttgaaaattgatatcctgtggtgccaaagtacagtggaaagagaggagaagtgtatcntgttttattttaattggtncgaagggggatttaaaaatatgta

SEQ ID NO: 261 - DNA, 2952 bp, Homo sapiens
  misc feature (20): n equals a,t,g, or c
  misc feature (33): n equals a,t,g, or c
  misc feature (35): n equals a,t,g, or c
cgggcatatacccttgtcanaaagcaaaccagnancggcaatttctaacttttgctccaaagccactctcttttttaaacaagcaccaatttaaagctatgaagtcacctgaagaaaagaacgtgtggctcttggacagcaagcaaaccatttctctccgtctgttstgtttttctcctagtccctctcctgccacctctccaagacttccgtgggacacccacttccctctgtcctagttctctttgtccaatcagatggcaagggyagtgcgtggaaaggccggggaggtgcagaaaccagagcccagggcaatggtgtctgtccagcccctccctctgtccctgtgctccaagctgcccccggctgcagcccaggccatggacatgtgcaccagtatgtacctgcaggcatcggggggaggggggcgtgtttctgggcctgccccagacactgcccttggctgccagcctaccctgcctgcactcctccaccatcacaatctcacccaaactcctgctcactcaagcaaaagcagcctctggccttccctccaccgctttgctccatctggcttaccactctccagggcctcctggggagcctgtcctgtgttcactttgtttcaggctggtctgtgccccgtgagccacatggcctagggtgatgccaggttgtcccgtcactggggtcccatctgtaaattctttgcgcccttcccggctgctgcctggggccctttcctgctctcccgtccgctgtgggtggtccccagcactcctctgtgggttttaccggaaaggtggccccagctgttgacttccagtcactgtcccagacggcacaaggttttctgtaggaaagctgccattgccccggccccttttcttcctttgtcccgttgtcgaggttttttcaaatagcgtgttgttcagtatgcaaatcaattattttaagaatcgcttttgtaaatatctttgtgaatattttagtatcgtctttgataatattcaacattttcatgacctggttatagcctttgctggtgtttttaaaatacctggactcaatgacaaagaccgagtcttctttttttttaaacaaaaacaaaaaaagcaaccagggctatttgtacagttgaaggggtgaacagaatgggcggctgtgctgggagttggaagaccgggcagcccgctatttagagccatccctcagtcagctggcagggacaagccaacgccaggtagcatgtggccacccttgcccagtgtctgtggcctggcaagtggccacgccctgtgtcagaccatctgggaattaagctccagacagacttacagatgccttccttaggagttcttgcttcttgcgttgatactttgccccagaaaggcctgggattcattctggttcttatcagggtgtgtccacactctgctcacaggtggatccacggctttccagtgcggagagtcgagatgctccctgcagcccaggccccgggcacctcctgcaaccatctctgggctcagcacctgaggcgggtttcctgggtcccctctccagcaagcctccaccagcaagctcggcccagagcttcccttccggctggctctgaaccgtgcgtggtgcctacagcctgcagtctggagacaagctcttccggagtgctctgggagccaggccagggtgtgagggaggtgcagaggcatccggggcgggagcaagccccaggttgtgacaggtgcaggtagacaacgcccataaacagagatggtcctgaactctggagagatccttccctgatcctttcggacgactacttggagccataagtaacctcagcaaaaacgaggcctctgcaagccacttttccatgccaagcatccacccggcccacaggcatgtttctgccgccactccgcaagatggacagggagccagcaggcaggcgggaagggccaagtacaggcaatcacccccatcttcttggtttgaagctttatccatgtatcatgttccgtgtagccattttattttttaagaaactgctaatactttctccctaatggaagccctgatcccccagagagctacaggtctgctcccgacgggcctcgggctgacccgtccacacagggccgtgtcaacagcagcgactcaagggacgtgtgtacatatgtaaatgagaaatagagacgtgtcaacagatgcattcatttctcttggaatgtgtattgtttttattttgcgaaacaaaacaaaacaaaaaaaaaagcttggaactccatcacgtggaaaaactagatcctgttggttatagcatttgtgagttctccacgtctgtctctctcgctcatgtaatatactctgaccctgagtggaaaggggtttttgttctgtttttattttacctacatgtactatttagcttcagtgtactagtcctgccacctgtgtatttttagggtgctatggaaataatgaaaagaaacggggatttcagaagaaaattgtaaccaaattcatactttgtataatttttgatatcatgatcacaggtgattcacacgtacacacataaacacacccaccagtgcagcctgaagtaactcccacagaaaccatcatcgtctttgtacatcgtatgtacaatgcaatcatttcatactttaaactggtcaaaaaactaattgtgatttctagtcttgcaaagctgtatgtagttagatgatgtgacaacctctaatatttatctaataaatatgtattcagatgaaacctgtatattaggtgttcatgtggttattttgtatttaaagatcaaattatttgactattgctagacatttctatactctgttgtaacactgaggtatctcatttgcccatgttaatttttttctaaataaattgacaaaaacaaaaaaaaaaaaaaaaaaaaaaaaaaaa

SEQ ID NO: 262 - DNA, 1367 bp, Homo sapiens
  misc feature (1316): n equals a,t,g, or c
gcagccatccgccaggccctgatgcccgtcatccttcaggacgcacccagcgccccaggccacgcgccccacagacaagcttctctgagcatctctgtgtccaacagtcagatccaagagaatgtggacattgccactgtctaccagatcttccctgacgaagtgctgggctcagggcagtttggagtggtctatggaggaaaacaccggaagacaggccgggacgtggcagttaaggtcattgacaaactgcgcttccctaccaagcaggagagccagctccggaatgaagtggccattctgcagagcctgcggcatcccgggatcgtgaacctggagtgcatgttcgagacgcctgagaaagtgtttgtggtgatggagaagctgcatggggacatgttggagatgatcctgtccagtgagaagggccggctgcctgagcgcctcaccaagttcctcatcacccagatcctggtggctttgagacaccttcacttcaagaacattgtccactgtgacttgaaaccagaaaacgtgttgctggcatcagcagacccatttcctcaggtgaagctgtgtgactttggctttgctcgcatcatcggcgagaagtcgttccgccgctcagtggtgggcacgccggcctacctggcacccgaggtgctgctcaaccagggctacaaccgctcgctggacatgtggtcagtgggcgtgatcatgtacgtcagcctcagcggcaccttccctttcaacgaggatgaggacatcaatgaccagatccagaacgccgccttcatgtacccggccagcccctggagccacatctcagctggagccattgacctcatcaacaacctgctgcaggtgaagatgcgcaaacgctacagcgtggacaaatctctcagccacccctggttacaggagtaccagacgtggctggacctccgagagctggaggggaagatgggagagcgatacatcacgcatgagagtgacgacgcgcgctgggagcagtttgcagcagagcatccgctgcctgggtctgggctgcccacggacagggatctcggtggggcctgtccaccacaggaccacgacatgcaggggctggcggagcgcatcagtgttctctgaggtcctgtgccctcgtccagctgctgccctccacagcggttcttcacaggatcccagcaatgaactgttctagggaaagtggcttcctgcccaaactggatgggacacgtggggagtggggtggggggagctatttccaaggcccctccctgtttccccagcaattaaaacggactcatctnctgccccatggccttgatctcaaaaaaaaaaaaaaaaaaaaaaaaaaaaaa

SEQ ID NO: 263 - DNA, 2986 bp, Homo sapiens
agccgcgcgccgtgcccgccgaccccacaggaaggcctggacgacggcccggacttcctctcagaagaggaccgcggacttaaagcaataaatgtagatcttcaaagtgatgctgctctgcaggtggacatttctgatgctcttagtgagcgggataaagtaaaattcactgttcacacaaagagttcattgccaaattttaaacaaaacgagttttcagttgttcggcaacatgaggaatttatctggcttcatgattcctttgttgaaaatgaagactatgcaggttatatcattccaccagcaccaccaagacctgattttgatgcttcaagggaaaaactacagaagcttggtgaaggagaagggtcaatgacgaaggaagaattcacaaagatgaaacaggaactggaagctgaatatttggcaatattcaagaagacagttgcgatgcatgaagtgttcctgtgtcgtgtggcagcacatcctattttgagaagagatttaaatttccatgtcttcttggaatataatcaagatttgagtgtgcgaggaaaaaataaaaaagagaaacttgaagacttctttaaaaacatggttaaatcagcagatggagtaatcgtttcaggagtaaaggatgtagatgatttctttgagcacgaacgaacatttcttttggartatcataaccgagttaaggatgcatctgctaaatctgatagaatgacaagatcccacaaaagtgctgcagatgattacaatagaattggttcttcattatatgctttaggaactcaggattctacagatatatgcaagttttttctcaaagtttcagaactgttcgataaaacaagaaaaatagaagcacgagtgtctgctgatgaagacctcaaactttctgatcttttaaaatattacttaagagaatctcaagctgctaaggatctcctgtatcgaaggtctaggtcactagtggattatgaaaatgctaataaagcactggataaagcaagagcaaaaaataaagatgttctacaggccgaaacttcccaacaattatgttgtcagaaatttgaaaaaatatctgagtctgcaaaacaagaacttatagattttaagacaagaagagttgctgcattcagaaaaaatttagtggaactggcagagttagaactgaagcatgcaaagggtaatctacagttgctgcagaactgcctggcagtgttaaatggagacacataagccacactccgccttcctgttaaaaagggctgccttccttcaaattttatttttgttttcttaatgatgttaagcatttatgctcactggaaacaaacaaaaagcagctgaaaaagtgcatcaactcctctttttctgagaaacatggagcagcgcacgcccaggcgatgccagtctgtgtgccgtgatgccgcactgtgttccccatgacagtggtccatcatcgtgcactcgtcatactcagaagtccaaagttcattcttctttaaagtagcctctataactctgtttattttataaatagtattccttatggctgccactcttatttacctttaaataatttctgaaatttaaccttttcagaatgcattgttgaaacaagataaagattgccttttttgaattttttaaattttgtttttaaaagcatataccaccttagttcattcatgtatcctggtaaagcatcttaatcagacttatttttaattactgaatatttcttagacgttttgggacagattttatgtaatctttataagtatgatttctgaagaaaagcaaatgcattagtatgtttgccttaaacttgtagactaaaccaagtattgtaaaataaacagcgataacagtgatagtttttaactctatggtcattgtatcactctggaaaatgtggagtagctgtaataaatctactcctgtattatgctttacagtgcaggtcttagtttttcttttttctcatttcttttgaaatggcatctcgaacaaagtccaccaatccctttacaaaagaatgaactgctcctctgtgtgtacttcatagaaggtggaatcggacagaggcaggttagtgacagttattcctgaaatacaggagcagagtacagtctgttgtggtttcccggattccgcgcctagctcagccaattaagcatgagacataggccattgagccacttagtagttatgcgagtggatagattggtatgtagagggaaagaggtctgctgtaaagaacaacacttgtttgtctgtggggaaagaaaagcagaatacttgagatgaaagttggcatacaaataggatactatcgccagtagttatattacaaacattatcggcctttctagtgtgaatgaacattagacacattattgtcattcctagtttaaagttaaggttgcgtggttggatttttccactatctttttctaatttttctaccatttggagaccgtaggcatttgggcctgtcaccccttggatgggttcctagtttgtttacattttcctgaaccctcctgagcgcccgttcttggtctaatccccagtcgtgatgattccacacttcctcagccgcatgttgtcttgcctcattcatgagctggtcagcgtttcgtctctttaactgacatgttccccagtgctgtttgaactgttgagtttccgttgctggctgagtgcgttttgtccttcacgtaaccttcgctggtaaaaataagcccatgtgatgtccaccagtggatgaatgctggaccgagagccctagcttctggatccaggtctaggcccttcatctgctgctctgtggcccagggcaggtttgcttgacctctgcctcagttctcgactctaaaggacatactgacctacctcacaggggtgttgtgaggattaataaatgttggtactctgctttggaaaaaaaaaaaaaaaaaaaaaaaaaaccccg

SEQ ID NO: 264 - DNA, 1027 bp, Homo sapiens
gctcgtgccgaattcggcacgaggttccattttccgtatctgcttcgggcttccacctcatttttttcgctttgcccattctgtttcagccagtcgccaagaatcatgaaagtcgccagtggcagcaccgccaccgccgccgcgggccccagctgcgcgctgaaggccggcaagacagcgagcggtgcgggcgaggtggtgcgctgtctgtctgagcagagcgtggccatctcgcgctgcgccgggggcgccggggcgcgcctgcctgccctgctggacgagcagcaggtaaacgtgctgctctacgacatgaacggctgttactcacgcctcaaggagctggtgcccaccctgccccagaaccgcaagtgagcaaggtggagattctccagcacgtcatcgactacatcagggaccttcagttggagctgaactcggaatccgaagttggaacccccgggggccgagggctgccggtccgggctccgctcagcaccctcaacggcgagatcagcgccctgacggccgaggcggcatgcgttcctgcggacgatcgcatcttgtgtcgctgaagcgcctcccccagggaccggcggaccccagccatccagggggcaagaggaattacgtgctctgtgggtctcccccaacgcgcctcgccggatctgagggagaacaagaccgatcggcggccactgcgcccttaactgcatccagcctggggctgaggctgaggcactggcgaggagagggcgctcctctctgcacacctactagtcaccagagactttagggggtgggattccactcgtgtgtttctattttttgaaaagcagacattttaaaaaatggtcacgtttggtgcttctcagatttctgaggaaattgctttgtattgtatattacaatgatcaccgactgaaaatattgttttacaatagttctgtggggctgtttttttgttattaaacaaataatttagatggtgaaaaaaaaaaaaaaaaaaaaaaaaaaaaaaaactacgag

SEQ ID NO: 265 - DNA, 1561 bp, Homo sapiens
cttaaagaggtaatttagccatcattcttatgccagcagatataaataaacttggacccatctggtcttcagctaaacctgagacattttaaagtgcatggacagccatggacagcaggccctcctctaacaggggatgcaaggcatggagaaagacaatcagtacccaagctcagccacagaagacaggagtcactcatataacttgtgtttagaagtttttggtagccacgcacactttctgaaatcacactatctggtggtttaatcatatttttaaagacagaatccctgagtgctgagcagattctcaaaacacatttagaatccctgaaattagaaagatcaatgacaaaatatctgtcagccaggccacaaacaggtgtaaaattatgaaaggagtggttggatgtgccaagtttggtaaagtggtgactgcatctgagaaagaggctgtgaggctgaactcttggtggcttccttctgtaacttccagagggagtcttcaacacaggccccgtgctcgtaggaatacggtagcacctatgtaggaagtgcgtggagttttctgtcttctttctgtgtgatttttggcctttttatcagcacttctcccctcccagsagcctggggatgccaaacatccagaatgtgatgggacaagatgggggcaggggcctcacctccctgcagaggtccggccaggtctccttgtccctggacaatctcctgagcctctctgcttggtggagcaggcacctgtgtgcagaattcccactgtggccagcacgaggaagtcttttctagtgaaaatgtgtcttgtggtcaggaataattatcctttcccctgtagccaccaaggagggcaaatagagaaaggtaacctaattgaaggattggtcatgtgaaaagggctacatttgggaagctgggaaaggcctccaggcttctagagcagctagcttgggctggattctcayacccaggctgccccttggattgttctacccaagcttttccctggggtctgggctcactccataaggtaaggtgccttttaccttatggtccttctttagcaggtaacaaaggagcatcaggggcaggctgccctggtggcatcacactggctagtgaggccgtgaatatcttgtcccccagcagggccgacagtttctatcacagaaaacagtgtgttcagtggtgaaaatcgttgcatgcatgttttcatctgagcgtgtccttctcccatactccctatcagccagccctgcctgtagctgctgtatggtgattgcacttggacatcagtccaatgactgcaagtcggcctggattttcacttgcagaggctacagctgcattgtcaggtctcccagccctgcagagagctccctccactggttagcagtgtgttgtgttttccattcatttcagaagagctacattgtgtcactggacatttttaaaaactgtgatttttaataaaaatttaaaatttgaaaaaaaaaaaaaaaaacctcgggggtaacttttrggggggccggggcccwtgcgtttt

SEQ ID NO: 266 - DNA, 1586 bp, Homo sapiens
  misc feature (1509): n equals a,t,g, or c
  misc feature (1544): n equals a,t,g, or c
ccctcctcttccttcctctttatagggagacactctgagaaagagcacattgtgggggcccactccatgtgatgtttgcttggttgcctgttcccttttctacctgcagagcacggttcccataagggcggcgagatcagcctcctgtctcatctggaagaccaccactctggggtctcagaggaatgatggaagccttggggtttctaaaattggaagtgaatggccccatggtgacggtggccctgtcagtggctctcttggccctcctgaaatggtactccacatcagcattctcaagactggagaagttaggcctcagacatcccaagccttctcctttcattggaaacttgacatttttccgccagggtttttgggaaagccaaatggagctcagaaagctgtatggacctctgtgtgggtactatcttggtcgtcggatgtttattgttatttctgagccagacatgatcaagcaggtgttggttgagaacttcagtaactttaccaacagaatggcgtcgggtttggagttcaagtcggtagccgacagcgttctgtttttacgtgacaaaagatgggaagaggtcagaggtgccctgatgtctgctttcagtcctgaaaagctgaacgagatggttcccctcatcagccaagcctgcgaccttctcctggctcatttaaaacgctatgcggaatctggggacgcatttgacatccagaggtgctactgcaattacaccacagatgtggttgccagcgtcgcctttggcaccccggtggactcctggcaggcccctgaggatccctttgtgaaacactgcaagcgtttcttcgaattctgcatccccagacctatcctggttttactcttatcatttccatccataatggtcccactggcccggattttgcccaataagaaccgagacgaactgaatggcttttttaacaaactcattaggaatgtgatttgccttgcgggaccagcaagctgccgaagagaggcggagagacttcctccaaatggtcctggatgcccgacattctgcaagtcccatgggcktgcaagactttgacatcgtcagagacgttttctcctctactgggtgcaagccgaacccttcccggcaacaccagcccagccctatggccaggcctttgactgtggatgagattgtgggccaggccttcatcttcctcatcgctggctatgaaatcatcaccaacacactttcttttgccacctacctactggccaccaaccctgactgccaagagaagcttctgagagaggtagacgtttttaaggagaaacacatggcccctgagttctgcagcctcgaggaaggcctgccctatctggacatggtgattgcaggagacgstggagggatgttaccccgccagcttttcaggatttcacacggggagggcagsttcagggaytkcgaggttgytgggggcagcgctttccccgcaggcgtttttgttaaggagattggnccttgggttgccttggccaattggaaccttgaggnatttgggccaagcccggagaatttttaaaccttgaaaagtgg

SEQ ID NO: 267 - DNA, 772 bp, Homo sapiens
  misc feature (4): n equals a,t,g, or c
  misc feature (614): n equals a,t,g, or c
  misc feature (639): n equals a,t,g, or c
  misc feature (707): n equals a,t,g, or c
  misc feature (736): n equals a,t,g, or c
tgtnttcagattkccttgtctygaggtcctcacaattrctctacaactcagaacagcaactgctraggctgccttgggaagaggatgatcctaaacaaagctctgatgctgggggccctygccctgaccaccgtgatgagcccctgtggaggtgaagacattgtggctgaccacgtygcctcttatggtgtaaacttgtaccagtcttacggtccctctggccagtacacccatgaatttgatggagatgagcagttctacgtggacctggggaggaaggagactgtctggtgtttgcctgttctcagacaatttagatttgacccgcaatttgcactgacaaacatcgctgtcctaaaacataacttgaacagtctgattaaacgctccaactctaccgctgctaccaatgaggttcctgaggtcacagtgttttccaagtctcccgtgacactgggtcagcccaacatcctcatctgtcttgtggacaacatctttcctcctgtggtcaacatcacatggctgagcaatgggcactcagtcacagaaggtgtttctgagaccagcttcctctccaagagtgatcattccttcttcaagatcagttacctcanccttcctcccttctgctgakgaganttatgactgcaaggtggagcactggggcctggatgagcctcttctgaaacactggggtgttaccttantaagagatgcctggggtaagccgcccagntaccttaattccttcagttaacatcggtcttaaaat

SEQ ID NO: 268 - DNA, 2482 bp, Homo sapiens
  misc feature (255): n equals a,t,g, or c
ggggaggtgctccggcgaggcaaggctgagctggaggagcagaagcgtttgctggacaggactgtggaccgactgaacaaggagttggagaagatcggggaggactctaagcaagccctgcagcagctccaggcccagctggaggattataaggaaaaggcccggcgggaggtggcagatgcccagcgccaggccaaggattgggccagtgaggctgagaagacctctggaggactgagccgacttcaggatganatccagaggctgcggcaggccctgcaggcatcccaggctgagcgggacacagcccggctggacaaagagctactggcccagcgactgcaggggctggagcaagaggcagagaacaagaagcgttcccaggacgacagggcccggcagctgaagggtctcgaggaaaaagtctcacggctggaaacagagttagatgaggagaagaacaccgtggagctgctaacagatcgggtgaatcgtggccgggaccaggtggatcagctgaggacagagctcatgcaggaaaggtctgctcggcaggacctggagtgtgacaaaatctccttggagagacagaacaaggacctgaagacccggttggccagctcagaaggcttccagaagcctagtgccagcctctctcagcttgagtcccagaatcagttgttgcaggagcggctacaggctgaagagagggagaagacagttctgcagtctaccaatcgaaaactggagcggaaagttaaagaactatccatccagattgaagacgagcggcagcatgtcaatgaccagaaagaccagctaagcctgagggtgaaggctttgaagcgtcaggtggatgaagcagaagaggaaattgagcgactggacggcctgaggaagaaggcccagcgtgaggtggaggagcagcatgaggtcaatgaacagctccaggcccggatcaagtctctggagaaggactcctggcgcaaagcttcccgctcagctgctgagtcagctctcaaaaacgaagggctgagctcagatgaggaattcgacagtgtctacgatccctcgtccattgcatcactgcttacggagagcaacctacagaccagctcctgttagctcgtggtcctcaaggactcagaaaccaggctcgaggcctatcccagcaagtgctgctctgctctgcccaccctgggttctgcattcctatgggtgacccaattattcagacctaagacagggaggggtcagagtgatggtgataaaaaaaaaaaaatcatcagcaataagctgatagatggactttccactgtaggagtggacgtttcaagccaactragccttttcctcaagtgccgacacctccctcatctctcttatagtggaaggatggtcagcattaggctgatggggactgagaaggataggaagggatagaaattgccatgtgtataaagctttattctttagcccttaaccctaaggctcagggaaataccctatgttattgtgctccctggattcctgcaactcattttccttccactctggagcagggtgaggggaatgttatgggtaacagacatgcaggcatggctctacccatttctttgcacaagtatggggcccatgtggtagtccccatacccctccarttcctatatttttgtcttcttcctttcccctctttgccattcctaccttgcatttttcctgtcagtgccttagccaaggcaaggarataaggatgctcttcttgctttttatatctgcacattcatacctctccaaagaccagcttttccccagccagggccctcagccttccctgctgccccagtgattgattgagagagctgttggggtttctctgccaatgacccctgggagagggactttggtagggtcatgataaagtggcgggggtctggtcctgctcagggttttcatccttcctcctctccctcctctgtgactgtggatatggttataaggtggttgcacctgggagccctgacaactggctgcacaaattccaaaagtaaaggtgtcagtccctgtggccttccttggggcttctctgaccacatgtgcccaacttcaataagagaaccaagggaccctcattttctgaggtgcttggctctgattcagggctttgcaaggggttagaagctgactgtaaaaatgggaagaggcaacggaagacatttatttctcctttggattttggggagaaccaagccctggtagggaagaggtaagggggatgattcacctccatatttcctaagcaggttgtatagggagccggtggcaggaggaaggctgttttcacaaatgacttgtaatgtcgtgattaaaaaaattcctatattcttctgcaaatcaaacgttctttcccaatccaatccagccttggttttattttaaattaaatattaaaattacacatttatattgaaaaaaaaaaaaa

SEQ ID NO: 269 - DNA, 2494 bp, Homo sapiens
tggtgtaaagcgtttttgcgcatgtgctgtcgccttgcgggaaaaggagcctttttcttcgacgatttccgggcgacgcaggaagtggctccagggcgcacgcgcgttgtttccgcggtagtcagggcagtttctaccgcaggcttaaggaggcttcgggctcctgggatttctgtccgcgctcctggccctcgtccttcgcgccagagcaggttcgcaaactcctcagacccttctgctcccggccgccgctttccgccggggcgagacccccaggttcaaaatgagcctgtttggaacaacctcaggttttggaaccagtgggaccagcatgtttggcagtgcaactacagacaatcacaatcccatgaaggatattgaagtaacatcatctcctgatgatagcattggttgtctgtcttttagcccaccaaccttgccggggaactttcttattgcaggatcatgggctaatgatgttcgctgctgggaagttcaagacagtggacagaccattccaaaagcccagcagatgcacactgggcctgtgcttgatgtctgctggagtgacgatgggagcaaagtgtttacggcatcgtgtgataaaactgccaaaatgtgggacctcagcagtaaccaagcgatacagatcgcacagcatgatgctcctgttaaaaccatccattggatcaaagctccaaactacagctgtgtgatgactgggagctgggataagactttaaagttttgggatactcgatcgtcaaatcctatgatggttttgcaactccctgaaaggtgttactgtgctgacgtgatataccccatggctgtggtggcaactgcagagaggggcctgattgtctatcagctagagaatcaaccttctgaattcaggaggatagaatctccactgaaacatcagcatcggtgtgtggctatttttaaagacaaacagaacaagcctactggttttgccctgggaagtatcgaggggagagttgctattcactatatcaaccccccgaaccccgccaaagataacttcacctttaaatgtcatcgatctaatggaaccaacacttcagctcctcaggacatttatgcggtaaatggaatcgcgttccatcctgttcatggcacccttgcaactgtgggatctgatggtagattcagcttctgggacaaagatgccagaacaaaactaaaaacttcggaacagttagatcagcccatctcagcttgctgtttcaatcacaatggaaacatatttgcatacgcttccagctacgactggtcaaagggacatgaattttataatccccagaaaaaaaattacattttcctgcgtaatgcagccgaagagctaaagcccaggaataagaagtagtggctggagactctggctcagccagagttgtttctctccactctgcctcatctctgtacgaatttgggtcccagccttgttgggttgtcagccatggacatggatttcaacccctggagaaaacgatgtcattgttcagcagctgagagcccaggcgtccgcggcgacttgccgtctctccattccactgcctgttgcagagtttttctgtaactaagggggttgaggttattgtagacgttagattgcggcaccgccagggattttgcagcgcttcagtgtacgtgttagagaatattggaaaagcgtctgtgagccccgtgctgtattttgtaataaagtcttttgcagattgcttcccgagsttcctttgkccytttctccccttgsccaccccgtaacctcaggaacatgcgtcctgcccagcatcagcgtggggttttgagttgagatttcagacaccctctgggaaatgcggcaaccttaggggaaagggagtccccagctgcgctcacttctgctgcgtggaacggcagcctctgtgagccctggtgggcagagtttgaatgtgtttttccttgcttccctcattcccatcttcaaaatccccagtgctttctggccttgctgctcagatttccgagtgactcaaatggggactgttacttgtgctgggtgacaggccatttgtgggtaacctcctaaggcccaagtgggtgacacttgcgtgactttcaagttagaacccaagccccctgcatgggaattgccctgaactcttacccaccccggtcccctgcatgggaattgccctgaaccctcagtagtggttgtttggctgttcttttgtattttgtgtaatttaaaattcctggttggtaagtattcaaaatgaaattcagctgggctgagaaaaagtgtgacttttgggtctgtcactgtatttctcacctgtgatctcaaatgcttcttaggcctttctgtttggactaatgtgtgaagtctgacttgctgagtgtaaaattctagtatcgatagtgttgtaagatgtgtttgcctactcataaaaaacaatgaaaataaaattttctactggaagagacc

SEQ ID NO: 270 - DNA, 1827 bp, Homo sapiens
tcgacccacgcgtccgcccacgcgtccggacccacgcgtccgggggcctggagtgcggcggcggcgggacccggagcaggagcggcggcagcagcgactgggggcggcggcggcgcgttggaggcggccatggcaaagcagtacgactcggtggagtgccctttttgtgatgaagtttccaaatacgagaagctcgccaagatcggccaaggcaccttcggggaggtgttcaaggccaggcaccgcaagaccggccagaaggtggctctgaagaaggtgctgatggaaaacgagaaggaggggttccccattacagccttgcgggagatcaagatccttcagcttctaaaacacgagaatgtggtcaacttgattgagatttgtcgaaccaaagcttccccctataaccgctgcaagggtagtatatacctggtgttcgacttctgcgagcatgaccttgctgggctgttgagcaatgttttggtcaagttcacgctgtctgagatcaagagggtgatgcagatgctgcttaacggcctctactacatccacagaaacaagatcctgcatagggacatgaaggctgctaatgtgcttatcactcgtgatggggtcctgaagctggcagactttgggctggcccgggccttcagcctggccaagaacagccagcccaaccgctacaccaaccgtgtggtgacactctggtaccggcccccggagctgttgctcggggagcgggactacggcccccccattgacctgtggggtgctgggtgcatcatggcagagatgtggacccgcagccccatcatgcagggcaacacggagcagcaccaactcgccctcatcagtcagctctgcggctccatcacccctgaggtgtggccaaacgtggacaactatgagctgtacgaaaagctggagctggtcaagggccagaagcggaaggtgaaggacaggctgaaggctatgtgcgtgacccatacgcactggacctcatcgacaagctgctggtgctggaccctgcccagcgcatcgacagcgatgacgccctcaaccacgacttcttctggtccgaccccatgccctccgacctcaagggcatgctctccacccacctgacgtccatgttcgagtacttggcaccaccgcgccggaagggcagccagatcacccagcagtccaccaaccagagtcgcaatcccgccaccaccaaccagacggagtttgagcgcgtcttctgagggccggcgcttgccactagggctcttgtgttttttttcttctgctatgtgacttgcatcgtggagacagggcatttgagtttatatctctcatgcatattttatttaatccccaccctgggctctgggagcagcccgctgagtggactggagtggagcattggctgagagaccaggagggcactggagctgtcttgtccttgctggttttctggatggttcccagagggtttccatggggtaggaggatgggctcgcccaccagtgactttttctaagagctcccggcgtggtggaagaggggacaggtccctcacccacccacaatcctattctcgggctgagaaccctgcgtgrggacagggctcgcctcaggaatgggctgtttttggcctaaccctcagaaacactggggctggcacaaactcttggtttcttcaacaggagaattttactgtgtttcttttggttccattgtttggagacattcctgggcacagtttggtccgttagaattaaaagttgaattttttttttttttaaaaaaaaaaaaaaaaaaaaaaaaaaaaaaaaaaaaaaa

SEQ ID NO: 271 - DNA, 3726 bp, Homo sapiens
  misc feature (2586): n equals a,t,g, or c
  misc feature (3523): n equals a,t,g, or c
  misc feature (3664): n equals a,t,g, or c
  misc feature (3687): n equals a,t,g, or c
gacgatgtgcagagcatcaactggctgcgggacggggtgcagctggcggaaagcaaccgcacccgcatcacaggggaggaggtggaggtgcaggactccgtgcccgcagactccggcctctatgcttgcktaaccagcagcccctcgggcagtgacaccacctacttctccgtcaatgtttcaratgctctcccctcctcggaggatgatgatgatgatgatgactcctcttcagagggakaagaaacagataacaccaaaccaaaccgtatgcccgtagctccatattggacatccccagaaaagatggaaaagaaattgcatgcagtgccggctgccaagacagtgaagttcaaatgcccttccagtgggrccccaaaccccacactgcgctggttgaaaaatggcaaagaattcaaacctgaycacagaattggaggctacaaggtccgttatgccacctggagcatcataatggactctgtggtgccctctgacaagggcaactacacctgcattgtggagaatgagtacggcagcatcaaccacacataccagctggatgtcgtggagcggtcccctcaccggcccatcctgcaagcagggttgcccgccaacaaaacagtggccctgggtagcaacgtggagttcatgtgtaaggtgtacagtgacccgcagccgcacatccagtggctaaagcacatcgaggtgaatgggagcaagattggcccagacaacctgccttatgtccagatcttgaagactgctggagttaataccaccgacaaagagatggaggtgcttcacttaagaaatgtctcctttgaggacgcaggggagtatacgtgcttggcgggtaactctatcggactctcccatcactctgcatggttgaccgttctggaagccctggaagagaggccggcagtgatgacctcgcccctgtacctggagatcatcatctattgcacaggggccttcctcatctcctgcatggtggggtcggtcatcgtctacaagatgaagagtggtaccaagaagagtgacttccacagccagatggctgtgcacaagctggccaagagcatccctctgcgcagacaggtaacagtgtctgctgactccagtgcatccatgaactctggggttcttctggttcggccatcacggctctcctccagtgggactcccatgctagcaggggtctctgagtatgagcttcccgaagaccctcgctgggagctgcctcgggacagactggtcttaggcaaacccctgggagagggctgctttgggcaggtggtgttggcagaggctatcgggctggacaaggacaaacccaaccgtgtgaccaaagtggctgtgaagatgttgaagtcggacgcaacagagaaagacttgtcagacctgatctcagaaatggagatgatgaagatgatcgggaagcataagaatatcatcaacctgctgggggcctgcacgcaggatggtcccttgtatgtcatcgtggagtatgcctccaagggcaacctgcgggagtacctgcaggcccggaggcccccagggctggaatactgctacaaccccagccacaacccagaggagcagctctcctccaaggacctggtgtcctgcgcctaccaggtggcccgaggcatggagtatctggcctccaagaagtgcatacaccgagacctggcagccaggaatgtcctggtgacagaggacaatgtgatgaagatagcagactttggcctcgcacgggacattcaccacatcgactactataaaaagacaaccaacggccgactgcctgtgaagtggatggcacccgaggcattatttgaccggatctacacccaccagagtgatgtgtggtctttcggggtgctcctgtgggagatcttcactctgggcggctccccataccccggtgtgcctgtggaggaacttttcaagctgctgaaggagggtcaccgcatggacaagcccagtaactgcaccaacgagctgtacatgatgatgcgggactgctggcatgcagtgccctcacagagacccaccttcaagcagctggtggaagacctggaccgcatcgtggccttgacctccaaccaggagtacctggacctgtccatgcccctggaccagtactcccccagctttcccgacamccggagctctacgtgctcctcaggggaggattccgtcttctctcatgagccgctgcccgaggagccctgcctgccccgacacccagcccagcttgccaatggcggactcaaacgccgctgactgccacccacacgccctccccagactccaccgtcagctgtaaccctcacccacagcccctgctgggcccaccacctgtccgtccctgtcccctttcctgctggcaggagccggctgcctaccaggggccttcctgtgtggcctgccttcaccccactcagctcacctctccctccacctcctctccacctgctggtgagaggtgcaaagaggcagatctttgctgccagccacttcatcccctcccagatgttggaccaacacccctccctgccaccaggcactgcctgnagggcagggagtgggagccaatgaacaggcatgcaagtgagagcttcctgagctttctcctgtcggtttggtctgttttgccttcacccataagcccctcgcactctggtggcaggtgccttgtcctcagggctacagcagtagggaggtcagtgcttcgtgcctcgattgaaggtgacctctgccccagataggtggtgccagtggcttattaattccgatactagtttgctttgctgaccaaatgcctggtaccagaggatggtgaggcgaaggccaggttgggggcagtgttgtgcccctggcccagcccaaactgggggctctgtatatagctatgaagaaaacacaaagtgtataaatctgagtatatatttacatgtctttttaaaagggtcgttaccagagatttacccatcgggtaagatgctcctggtggctgggaggcatcagttgctatatattaaaaacaaaaaagaaaaaaaaggaaaatgtttttaaaaaggtcatatattttttgctacttttgctgttttatttttttaaattatgttctaaacctattttcagtttaggtccctcaataaaaattgctgctgcttcatttatctatgggctgtatgaaaagggtgggaatgtccactggaaagaagggacacccacgggccctggggctaggtctgtcccgagggcaccgcatgctcccggcgcaggttccttgtaacctcttcttcctaggtcctgcacccagacctcacgacgcacctcctgcctctccgctgcttttggaaagtcagaaaaagaagatgtctgcttcgagggcaggaaccccatccatgcagtagaggcgctgggcagagagtcaaggcccagcagccatcgaccatggatggtttcctccaaggaaaccggtggggttgggytggggagggggcanctacctaggawtagccacggggtagagytacagtgattaagaggaaagcaagggcgcggttgytcamgsctgtaatcccagcactttgggacaccgaggtgggcagatcacttcaggtcaggagtttgagaccagcctggncaacttagtgaacccccatcttntacttaaaaatgcaaaaattatccaggcatggtggcaca

SEQ ID NO: 272 - DNA, 656 bp, Homo sapiens
  misc feature (198): n equals a,t,g, or c
  misc feature (605): n equals a,t,g, or c
  misc feature (619): n equals a,t,g, or c
gtgtccactgmgcatcctcccgccacacagaaacccgcccagccggggccaccgaccccaccccctgcctggaaacttaaaggaggccggagctgtggggagctcagagctgagatcctacaggagtccagggctggagagaaaacctctgcgaggaaagggaaggagcaagccgtgaatttaagggacgctgtgaancaatcatggatgcaatgaagagagggctctgctgtgtgctgctgctgtgtggagcagtcttcgtttcgcccagccaggaaatccatgcccgattcagaagaggagccagatcttaccaagtgatctgcagagatgaaaaaacgcagatgatataccagcaacatcagtcatggctgcgccctgtgctcagaagcaaccgggtggaatattgctggtgcaacagtggcagggcacagtgccactcagtgcctgtcaaaagttgcagcgagccaaggtgtttcaacgggggsacctgccagcaggcctgtacttctcagatttcgtgtgccaktgccccgaagatttctkggaatkctgtgaawaataccaggccctgctacgagaccagggctcagtaaagggcctgnaccacggaaattgnccgtgaccatggaaaagcgttgccaaacctaaggggg

SEQ ID NO: 273 - DNA, 1177 bp, Homo sapiens
cggagcgggccgaggactccagcgtgcccaggtctggcatcctgcacttgctgccctctgacacctgggaagatggccggcccgtggaccttcacccttctctgtggtttgctggcagccaccttgatccaagccaccctcagtcccactgcagttctcatcctcggcccaaaagtcatcaaagaaaagctgacacaggagctgaaggaccacaacgccaccagcatcctgcagcagctgccgctgctcagtgccatgcgggaaaagccagccggaggcatccctgtgctgggcagcctggtgaacaccgtcctgaagcacatcatctggctgaaggtcatcacagctaacatcctccagctgcaggtgaagccctcggccaatgaccaggagctgctagtcaagatccccctggacatggtggctggattcaacacgcccctggtcaagaccatcgtggagttccacatgacgactgaggcccaagccaccatccgcatggacaccagtgcaagtggccccacccgcctggtcctcagtgactgtgccaccagccatgggagcctgcgcatccaactgctgcataagctctccttcctggtgaacgccttagctaagcaggtcatgaacctcctagtgccatccatgccaaggtggcccaactgatcgtgctggaagtgtttccctccagtgaagccctccgccctttgttcaccctgggcatcgaagccagctcggaagctcagttttacaccaaaggtgaccaacttatactcaacttgaataacatcagctctgatcggatccagctgatgaactctgggattggctggttccaacctgatgttctgaaaaacatcatcactgagatcatccactccatcctgctgccgaaccagaatggcaaattaagatctggggtcccagtgtcattggtgaaggccttgggattcgaggcagctgagtcctcactgaccaaggatgcccttgtgcttactccagcctccttgtggaaacccagctctcctgtctcccagtgaagacttggatggcagccatcagggaaggctgggtcccagctgggagtatgggtgtgagctctatagaccatccctctctgcaatcaataaacacttgcctgtgaaaaaaaaaaaaaaaaaaaaaaaaaaaaaaaaaa

SEQ ID NO: 274 - DNA, 1353 bp, Homo sapiens
  misc feature (1344): n equals a,t,g, or c
ggtgatgtccgtgtcatctgagaagaggagatttcaggggctgactttgacttagcagatgcctttcgtgatggaggaaataacgacccagcacctcttaattcacccaagctgaagccaaatgcgaaccctgagcagcctggattcattggggatgactttgacttagcagatgccttacatgacaaaggaaactacgagccagcaccactgaacccacccaaaccaaagccaaatccaaaccccaagcagcctgattccaccggggatgactttgatttcacagatgtttcttcatggtgaacgaaacaatggtggtttcgatttatcygatgcccttcctgacaatgaaaacaagaaacccactgcaatccccaagaaacccagtgctggggatgactttgacttaggagatgctgttgttgatggagaaaatgacgacccacgaccaccgaacccacccaaaccgatgccaaatccaaaccccaaccaccctagttcctccggtagcttttcagatgctgaccttgcggatggcgtttcaggtggagaaggaaaaggaggcagtgatggtggaggcagccacaggaaagaaggggaagaggccgacgccccaggcgtgatccccgggattgtgggggctgtcgtggtcgccgtggctggagccatctctagcttcattgcttaccagaaaaagaagctatgcttcaaagaaaatgcagaacaaggggaggtggacatggagagccaccggaatgccaacgcagagccagctgttcagcgtactcttttagagaaatagaagattgtcggcagaaacagcccaggcgttggcagcagggttagaacagctgcctgaggctcctccctgaaggacacctgcctgagagcagagatggaggccttctgttcacggcggattctttgttttaatcttgcgatgtgctttgcttgttgctgggcggatgatgtttactaacgatgaattttacatccaaagggggataggcacttggacccccattctccaaggcccgggggggcggtttcccatgggatgtgaaaggctggccattattaagtccctgtaactcaaatgtcaaccccaccgaggcacccccccgtcccccagaatcttggctgtttacaaatcacgtgtccatcgagcacgtctgaaacccctggtagccccgacttctttttaattaaaataaggtaagcccttcaatttgtttcttcaatatttctttcatttgtagggatatttgtttttcatatcagactaataaaaagaaattagaaaccaaaaaaaaaaaaaaaaaaaaaaaaaaaaaaaaaaaaaanggggggggg

SEQ ID NO: 275 - DNA, 2662 bp, Homo sapiens
  misc feature (2647): n equals a,t,g, or c
tagaggatccaagcttacgtacgcgtccggagaccgcttgtgctggagtcggagttgtaacgctccactgactgatagagcgaccggccgaccatggcgcccggagtggcccgcgggccgacgccgtactggaggttgcgcctcggtggcgccgcgctgctcctgctgctcatcccggtggccgccgcgcaggagcctcccggagctgcttgttctcagaacacaaacaaaacctgtgaagagtgcctgaagaacgtctcctgtctttggtgcaacactaacaaggcttgtctggactacccagttacaagcgtcttgccaccggcttccctttgtaaattgagctctgcacgctggggagtttgttgggtgaactttgaggcgctgatcatcaccatgtcggtagtcgggggaaccctcctcctgggcattgccatctgctgctgctgctgctgcaggaggaagaggagccggaagccggacaggagtgaggagaaggccatgcgtgagcgggaggagaggcggatacggcaggaggaacggagagcagagatgaagacaagacatgatgaaatcagaaaaaaatatggcctgtttaaagaagaaaacccgtatgctagatttgaaaacaactaaagcgctccagcacatcagtcccgacgcttcctgtgaggtgcacrctccgcagcccagcccagccgggagaccacgtggccattgcggtctcctgaccttggccagtgaacctgccagccttccaggacaggcggccggagagctgcccctgaaggacagtcctctcgtcttgcagactggtgaccttctattccctgttcatctctgtttctagatttagtcacttgaaataagaaatctttggggtttgggcttttttatactcttctcagtttgtgaaacgctaactgcacacgaagccgcctgacggcacccagcgctgtggctgtcattctcccagggcagaaccctgcgtttctctctgtccactaacaagcttcacacgcaacacagggaagtcggtttgacttttgtcatgaggagaactgaccagccctcatcattccccataaaaccacggacagcgtctgtgtgcgcatcttgagtcttcacacctgttgactcacacggcttttgctgatgacacggggctccagtacacagtctgataaggacttaacgtcctaacctcaattgtattaaatagcattggggaatagctaaacctttttaaaaaaatttattggattttcctccctgcttaaaagatttcaccagaaaaccttcatataaaaattcaggccctttttggacaatttttaaaatttgtatctttactagaacatgagaatctttttcccttggaagcttgaattataaatgtggtgtttggcctgcctcagcagcaccagttgactgctcgtgtgccagcggtgtggggaggacggggcaggacgctgcagctctctccagccctgttggcatcctcagtgcctgcaggcctctcgctgcctgttgggctgtctggggggtggccatttagggatcgtggggacggggtccaccccaagaagaaagaaaggcccgtccacaggcccggctctgggccacgtgccccggaagcaggtgtgtccagagtcagctgagggctctccccacaccacccagcaggcgctggtgctccttctgcctcatgggaccagtccagcttccagccgctctggctcgagggtggtctgascacttccttctgagtgggcttctctgggagctctccagtggcactgctggacctgcccacgtttctgtaaaatcaggatacgtggctttagtaagcagaccaagcgcttcgtggcagggaaagcagcgtgcggggaagtcactgaaaagtgctgcctaaggaagtttggaaatagtccccgttccagattgccttgaattttaaaacattttgctttgggaaagtaggtcagcagcacctaagatcaaggatgcgttccattttcacacttcacagtcatgaaaactgagaagactgtcttcagcgtgaactaaagttcacaggcagatcactgatccagaacacttcaagaactcgtcaaacagctcgataagcctttttgactgtgtacatctgtaccgggaataacattcctaggctgaaatttccacaaagaatagaacctgtacccagttcttcaggctgatttccctgacctcttgggcatttgtatttgtagtaaagtattgcagagattcctaagtattttatagcagccatcaaaattggactttgtattgtttattcataaaagacacttggtaatagacttcagtgaactctgtatgaatgcagtagtgtgygtgcaaaatccgcttcctgagcgtagggtgctgagctggcgctagggctcggttgtgaaatacagcgtagtcagcccttgcgctcagtgtagaaacccacgtctgtaaggtcggtcttcgtccatctgcttttttctgaaatacactaagagcagccacaaaactgtaacctcaaggaaaccataaagcttggagtgccttaatttttaaccagtttccaataaaacggtttactacctgcgaaaaaaaaaaaaaaaaaaaaaaaggnggccgctctaaagat

SEQ ID NO: 276 - DNA, 2554 bp, Homo sapiens
  misc feature (2529): n equals a,t,g, or c
  misc feature (2537): n equals a,t,g, or c
ggttcagagaattgaagaacacagtatcatacagtgggaaaaggaaagggcccgattcgttgtctgatggacctgcttgcaaaaggccagctctgttgcattcccaatttttgacaccacctcaaacaccaacgcccggggagagcatggaagatgttcatctcaatgaacscaaacaggagagcagtgctgatctgcttcagaacattatcaacattaagaatgaatgcagccccgtttccctgaacacagttyaagttagctggctgaaccccgtggtggtccctcagagctcccccgcagagcagtgtcaggacttccatggagggcaggtcttttctccacctcagaaatgccaaccattccaagtcaggggctcccaacaaatgatagaccaggcttccctgtaccagtattctccacagaaccagcatgtagagcagcagccacactacacccacaaaccaactctggaatacagtccttttcccatacctccccagtcccccgcttatgaaccaaacctctttgatggtccagaatcacagttttgcccaaaccaaagcttagtttcccttcttggtgatcaaagggaatctgagaatattgctaatcccatgcagacttcctccagtgttcagcagcaaaatgatgctcacttgcacagcttcagcatgatgcccagcagcgcctgtgaggccatggtggggcacgagatggcctctgactcttcaaacacttcactgccattctcaaacatgggaaatccaatgaacaccacacagttagggaaatcactttttcagtggcaggtggagcaggaagaaagcaaattggcaaatatttcccaagaccagtttctttcaaaggatgcagatggtgacacgttccttcatattgctgttgcccaagggagaagggcactttcctatgttcttgcaagaaagatgaatgcacttcacatgctggatattaaagagcacaatggacagagtgcctttcaggtggcagtggctgccaatcagcatctcattgtgcaggatctggtgaacatcggggcacaggtgaacaccacagactgctggggaagaacacctctgcatgtgtgtgctgagaagggccactcccaggtgcttcaggcgattcagaagggagcagtgggaagtaatcagtttgtggatcttgaggcaactaactatgatggcctgactccccttcactgtgcagtcatagcccacaatgctgtggtccatgaactccagagaaatcaacagcctcattcacctgaagttcaggagcttttactgaagaataagagtctggttgataccattaagtgcctaattcaaatgggagcagcggtggaagcgaaggatcgcaaaagtggccgcacagccctgcatttggcagctgaagaagcaaatctggaactcattcgcctctttttggagctgcccagttgcctgtcttttgtgaatgcaaaggcttacaatggcaacactgccctccatgttgctgccagcytgcagtatcggttgacacaattagatgctgtccgcctgttgatgaggaagggagcagacccaagtactcggaacttggagaacgaacagccagtgcatttggttcccgatggccctgtgggagaacagatccgacgtatcctgaagggaaagtccattcagcagagagctccaccgtattagctccattagcttggagcctggctagcaacactcactgtcagttaggcagtcctgatgtatctgtacatagaccatttgccttatattggcaaatgtaagttgtttctatgaaacaaacatatttagttcactattatatagtgggttatattaaaagaaaagaagaaaaatatctaatttctcttggcagatttgcatatttcatacccaggtatctgggatctagacatctgaatttgatctcaatggtaacattgccttcaattaacagtagcttttgagtaggaaaggactttgatttgtggcacaaaacattattaatatagctattgacagtttcaaagcaggtaaattgtaaatgtttctttaagaaaaagcatgtgaaaggaaaaaggtaaatacagcattgaggcttcatttggccttagtccctgggagttactggcgttggacaggcttcagtcattggactagatgaaaggtgtccatggttagaatttgatctttgcaaactgtatataattgttatttttgtccttaaaaatattgtacatacttggttgttaacatggtcatatttgaaatgtataagtccataaaatagaaaagaacaagtgaattgttgctatttaaaaaaattttacaattcttactaaggagtttttattgtgtaatcactaagtctttgtagataaagcagatggggagttacggagttgttcctttactggctgaaagatatattcgaattgtaaagatgctttttctcatgcattgaaattatacattatttgtagggaattgcatgccttttttttttttncccccganaaagggtttgccctggg

SEQ ID NO: 277 - DNA, 1806 bp, Homo sapiens
  misc feature (1790): n equals a,t,g, or c
  misc feature (1800): n equals a,t,g, or c
tcgacccacgcgtccgctcccactctcggccgacacccctcatggccaaccgttacaccatggatctgactgccatctacgagagcctcctgtcgctgagccctgacgtgcccgtgccatccgaccatggagggactgagtccagcccaggctggggctcctcgggaccctggagcctgagcccctccgactccagcccgtctggggtcacctcccgcctgcctggccgctccaccagcctagtggagggccgcagctgtggctgggtgcccccaccccctggcttcgcaccgctggctccccgcctgggccctgagctgtcaccctcacccacttcgcccactgcaacctccaccaccccctcgcgctacaagactgagctatgtcggaccttctcagagagtgggcgctgccgctacggggccaagtgccagtttgcccatggcctgggcgagctgcgccaggccaatcgccaccccaaatacaagacggaactctgtcacaagttctacctccagggccgctgccctacggctctcgctgccacttcatccacaaccctagcgaagacctggcggccccgggccaccctcctgtgcttcgccagagcatcagcttctccggcctgccctctggccgccggacctcaccaccaccaccaggcctggccggcccttccctgtcctccagctccttctcgccctccagctccccaccaccacctggggaccttccactgtcaccctctgccttctctgctgcccctggcacccccctggctcgaagagaccccaccccagtctgttgcccctcctgccgaaggccactcctatcagcgtctgggggcccttgggtggcctggttcggaccccctctgtacagtccctgggatccgaccctgatgaatatgccagcagcggcagcagcctggggggctctgactctcccgtcttcgaggcgggagtttttgcaccaccccagcccgtggcagccccccggcgactccccatcttcaatcgcatctctgtttctgagtgacaaagtgactgcccggtcagatcagctggatctcagcggggagccacgtctcttgcactgtggtctctgcatggaccccagggctgtggggacttgggggacagtaatcaagtaatccccttttccagaatgcattaacccactcccctgacctcacgctggggcaggtccccaagtgtgcaagctcagtattcatgatggtgggggatggagtgtcttccgaggttcttgggggaaaaaaaattgtagcatatttaagggaggcaatgaaccctctcccccacctcttccctgcccaaatctgtctcctagaatcttatgtgctgtgaataataggccttcactgcccctccagtttttatagacctgaggttccagtgtctcctggtaactggaacctctcctgagggggaatcctggtgctcaaattaccctccaaaagcaagtagccaaagccgttgccaaaccccacccataaatcaatgggccctttatttatgacgactttatttattctaatatgattttatagtatttatatatattgggtcgtctgcttcccttgtatttttcttcctttttttgtaatattgaaaacgacgatataattattataagtagactataatatatttagtaatatatattattaccttaaaagtctatttttgtgttttgggcatttttaaataaacaatctgagtgtaaaaaaaaaaaaaaaagggcgggcgctcctaaaagatcccccaaanggggcccaancttaac

SEQ ID NO: 278 - DNA, 2508 bp, Homo sapiens
  misc feature (1): n equals a,t,g, or c
  misc feature (898): n equals a,t,g, or c
  misc feature (949): n equals a,t,g, or c
  misc feature (2500): n equals a,t,g, or c
ncgctcgcagcttctcgctctcgcctgcctgcccgctcccttgcttgctcgcgctttcgctcgccctctcctcgaggatcgaggggactctgaccacagcctgtggctgggaagggagacagaggcggcggcggctcaggggaaacgaggctgcagtggtggtagtaggaagatgtcgggcgaggacgagcaacaggagcaaactatcgctgaggacctggtcgtgaccaagtataagatggggggcgacatcgccaacagggtacttcggtccttggtggaagcatctagctcaggtgtgtcggtactgagcctgtgtgagaaaggtgatgccatgattatggaagaaacagggaaaatcttcaagaaagaaaaggaaatgaagaaaggtattgcttttcccaccagcatttcggtaaataactgtgtatgtcacttctcccctttgaagagcgaccaggattatattctcaaggaaggtgacttggtaaaaattgaccttggggtccatgtggatggcttcatcgctaatgtagctcacacttttgtggttgatgtagctcaggggacccaagtaacagggaggaaagcagatgttattaaggcagctcacctttgtgctgaagctgccctacgcctggtcaaacctggaaatcagaacacacaagtgacagaagcctggaacaaagttgcccactcatttaactgcacgccaatagaaggtatgctgtcacaccagttgaagcagcatgtcatcgatggagaaaaaaccattatccagaatcccacagaccagcagaagaaggaccatgaaaaagctgaatttgaggtacatgaagtatatgctgtggatgttctcgtcagytcaggagagggcaaggtgaggagagtaccaganttggcaaagaggggtgactgagagttttcaccagaccaaatgttacttaanttactctttcaaggccaaggatgcaggacagagaaccactatttacaaacgagacccctctaaacagtatggactgaaaatgaaaacttcacgtgccttcttcagtgaggtggaaaggcgttttgatgccatgccgtttactttaagagcatttgaagatgagaagaaggctcggatgggtgtggtggagtgcgccaaacatgaactgctgcaaccatttaatgttctctatgagaaggagggtgaatttgttgcccagtttaaatttacagttctgctcatgcccaatggccccatgcggataaccagtggtcccttcgagcctgacctctacaagtctgagatggaggtccaggatgcagagctaaaggccctcctccagagttctgcaagtcgaaaaacccagaaaaagaaaaaaaagaaggcctccaagactgcagagaatgccaccagtggggaaacattagaagaaaatgaagctggggactgaggtgggtcccatctccccagcttgctgctcctgcctcatccccttcccaccaaaccccagactctgtgaagtgcagttcttctccacctaggaccgccagcagagcggggggatctccctgcccccaccccagttccccaacccactcccttccaacaacaaccagctccaactgactctggtcttgggaggtgaggcttcccaaccacggaagactactttaaatgaaaaaaagaaattgaataataaaatcaggagtcaaaattcatcgtcttcaagcccctctttctagccttttctactactctctgcttggtcaaggtttgtgccccactacagaacagggctaaattagccaccaccactgaaaactcagccgaatttttttataccactctgatgtcagcattttttccatctgtttggggctttttcctcttttttccattctccccaaatattttatctggcttcaaaattaagaggattatttttcagattgtttttattcagtgtggccgattcctcatctgattcaggctgtccagtcaggcccctcccattttaggagctggagccttcatttatgaagagattctcatctatgaaatggatcctcatttgtaaatcttttttcttccattttcacaaagctgtaaagaaataatccatctcaaccttaccctttttctctggagtcagtggggtctttcctcgctccatcttacacagacctgagctggaagctcaactggttttgttccctgtttgaaatattgtgatctccctcccatgaaagaaaaaccaagaaccagaggcgtagactgactgaagacacaactcctggctttctgaagctatggacttggattggattgctgggggtttgtagagaaaggtgacaaatttcagtacctctggcatgctgtcccaggaaactagggctcccactaacttatgaggtttttaaacacattgaaaatgacatgacattaaaataaatttggatttgctcataaaaaaaaaaaaaaaaaaaaaaaaaaaaaaaaaaaaaaaaaaanaaaaaaaa

SEQ ID NO: 279 - DNA, 2412 bp, Homo sapiens
gcccacgcgtccgccgccaccacctcagctgckgaccgaggcgagatggcggccaccgagggggtcggggaggctgcgcaagggggcgagcccgggcagccggcgcaacccccgccccagccgcacccaccgccgccccagcagcagcacaaggaagagatggcggccgaggctggggaagccgtggcgtcccccatggacgacgggtttgtgagcctggactcgccctcctatgtcctgtacagggacagagcagaatgggctgatatagatccggtgccgcagaatgatggccccaatcccgtggtccagatcatttatagtgacaaatttagagatgtttatgattacttccgagctgtcctgcagcgtgatgaaagaagtgaacgagcttttaagctaacccgggatgctattgagttaaatgcagccaattatacagtgtggcatttccggagagttcttttgaagtcacttcagaaggatctacatgaggaaatgaactacatcactgcaataattgaggagcagcccaaaaactatcaagtttggcatcataggcgagtattagtggaatggctaagagatccatctcaggagcttgaatttattgctgatattcttaatcaggatgcaaagaattatcatgcctggcagcatcgacaatgggttattcaggaatttaaactttgggataatgagctgcagtatgtggaccaacttctgaaagaggatgtgagaaataactctgtctggaaccaaagatacttcgttatttctaacaccactggctacaatgatcgtgctgtattggagagagaagtccaatacactctggaaatgattaaactagtaccacataatgaaagtgcatggaactatttgaaagggattttgcaggatcgtggtctttccaaatatcctaatctgttaaatcaattacttgatttacaaccaagtcatagttccccctacctaattgcctttcttgtggatatctatgaagacatgctagaaaatcagtgtgacaataaggaagacattcttaataaagcattagagttatgtgaaatcctagctaaagaaaaggacactataagaaaggaatattggagatacattggaagatcccttcaaagcaaacacagcacagaaaatgactcaccaacaaatgtacagcaataacaccatccagaagaacttgatggaatgcttttattttttattaagggaccctgcaggagtttcacacgagagtggtccttccctttgcctgtggtgtaaaagtgcatcacacaggtattgctttttaacaagaactgatgctccttgggtgctgctgctactcagactagctctaagtaatgtgattcttctaaagcaaagtcattggatgggaggaggaagaaaaagtcccataaaggaacttttgtagtcttatcaacatataatctaatcccttagcatcagctcctccctcagtggtacatgcgtcaagatttgtagcagtaataactgcaggtcacttgtatgtaatggatgtgaggtagccgaagtttggttcagtaagcagggaatacagtcgttccatcagagctggtctgcacactcacattatcttgctatcactgtaaccaactaatgccaaaagaacggttttgtaataaaattatagctgtatctaaaaaaaaaaaaaaaaaaacaaaarcaataaggactatcttgtttgtcattgcatctttagtcttcagtattctgagcacttaggggcagagcatgatgaccggctaacccaacaactacacccaactaatcttttgcctgcttccactataaaagccagaaaaaaaagaatcatttttcccaacctcccttgcaaccattagacactacacacacaaaaaagctctgcccaataacatctgagcaaagatcttagggagaagcagactgcttctaagagcacttatgcaattctgataaaagggtcagagtgactgatacaaaccgtctccctttccttctgtcttgaatacaaacatgatgcttgagttggagtagtgccatcttgcaaccatgaaggaaaagcccaaaaggccactgagccacccaacaaatgcagctgctgcatttatgttacatgagaaaattgtaccatcgccgattcaatctgctgtgtttgtgtcatctgttacttgcacctgagaacattcctaagtaacttataaattaataatttttgtcacttaaaaacaggtaatttttttatttcaaatattttcaaatgtttagtcccagaaacttctcctcaagaggaattttaaactaagccgaataaataatgttgatcaaaggagaggtgttctcactgaagaggaaaggagattgctgtgtggactcctctgccgaatt

SEQ ID NO: 280 - DNA, 3572 bp, Homo sapiens
aaaaacccccaaaaagtctcgtgtgaggttcagtaatatcatggagattcgacagcttccgtcaagtcatgcattggaagcaaagttgtctcgcatgtcatatcctgtgaaagaacaagaatccatactgaaaactgtggggaaacttactgcaactcaagtagcgaaaattagcttttttttttgctttgtgtggtttttggcaaatttgtcatatcaagaagcactttcagacacacaagttgctatagttaatattttatcttcaacttccggactttttaccttaatccttgctgcagtatttccaagtaacagtggagatagatttaccctttctaaactattagctgtaattttaagcattggaggcgttgtactggtaaacctggcagggtctgaaaaacctgctggaagagacacagtaggttccatttggtctcttgctggagccatgctctatgctgtctatattgttatgattaagagaaaagtagatagagaagacaagttggatattccaatgttctttggttttgtaggtttgtttaatctgctgctcttatggccaggtttctttttacttcattatactggatttgaggacttcgagtttcccaataaagtagtattaatgtgcattatcattaatggccttattggaacagtactctcagagttcctgtggttgtggggctgctttcttacctcatcattgataggcacacttgcactaagccttacaatacctctgtccataatagctgacatgtgtatgcaaaaggtgcagttttcttggttattttttgcaggagctatccctgtatttttttcattttttattgtaactctcctatgccattataataattgggatcctgtgatggtgggaatcagaagaatatttgcttttatatgcagaaaacatcgaattcagagagttccagaagacagcgaacagtgtgagagtctcatttctatgcacagtgtttctcaggaggatggagctagttagctgtctgttgtctgtagcccagcttgataatggaactatacagcgaagagacaatctctggcaagtttttgtagaaaaaatgtttcagtgcctagtctgaaaaataacagtttgagttctttgaaactctaaaatatatttttctcatacctgttttcttcattttcataatgaagcactttgctatgtagctgtgtacatatcactacagttataggaagtttcagtctacagtccatccaaaggaccaacctgccttacacatctcaaggaattcagctgttgaaatcatttgaactaatcaaggaataaatcctaatgttctgggactttattttcacatgttaaatgctggaatatattatgaaaatgttttcaagaaatcacttaagtgttcatagaccagtatttctgacaggtaaaatgctaaaataagctacctgtaataagtgtggattatatttttgggttttgtagaatattgcaaattaaccacacaaaaaatgtttaatttatgcaacaagcatgtttgtgcaaatttcatgggactttaaaaagaataagtatttgagaaaatatctggttcacttacactacatttactgtattattcttttatagcattaggtgccttgtattttaaatctgtgacaaaccatggcaaatttttaaaggggaagtattattataaaatgaagaaatatgtatttctaaaggctatattgctgtaaacttaattgataaagctctgtttaatttagagttttgaagaaatagtctcccttcaattaagaaattttcataatggaatgatttaaattgaagtgacaaagagtattattaaaatacaatgtttatacgtgtatttgtgtaytgtagatgtatcaagtgatttctaatttttttcacatatgaatgtgccagattactctagaactagatgtctcttctttaaataattttagttttcctgaataaatttgtaatggttaaagtaccaagtaagtaaggcragaagggattctgtttttaaaatcacatcagaacttttcctctactaagattataaattaaatgtaaaatactcctaattgcaattcttaaacttaggccttacatgtacttattatgcaactgctcctggactctattcaccatagatatcagtaaacktatktcccargattcacaggcttttgattaatcaatattcttttcaagtttgctgtgaagagtttagttctcttcaaaatttcttaactaatctgatttyyaagaattctctttgcagtgtttagcttcctattcacattcttaaaattgctttggtgttaccatgagtctaaaatgaagtttagccttccttttgtttcattctgagaacttctatattatattacctttaaaaattgtttatgatattaaatttaaaatacaaacagctctcttttttyttttttttttttttaatcatccagcccaaagtggcaaaaacagctcttttctcatttggcaccaccaataacgcaagttaaaaataatgttgagtttattatacttttgacctgtttagctcaacagggtgaaggcatgtaaagaatgtggacttctgaggaattttcttttaaaaagaacataatgaagtaacattttaattactcaaggactacttttggttgaagtttataatctagatacctctactttttgtttttgctgttcgacagttcacaaagaccttcagcaatttacagggtaaaatcgttgaagtagtggaggtgaaactgaaatttaaaattawtcygtaaatactatagggaaagaggctgagcytagaatcytttggttgttcakgkgttctgkgctcttatcatcacacaggtcakgtgttgttactcaggattctggaagtactaagccgtagttaacaggctggatagatcttcagccaatcttctttcattatactgctgcttttctgtttcttaaaaaacaaaaatcaatgaacaacttctttagaaggaagcaccactgttcaattggttaactgaaagtatgaaatcactgccgctttgcttgcccacctgtttgctttttctcacaggttttatttatctgaatgattgttgcatttgaatactgtagcccatggtgagtgagcagttgaagacttcctttctgcaccttcatagttaagggttcatcttctcaagaaataaagttgtgctgggttgtttcaattctgtagatcacctagaaactaggtaacaaggcccttggatcacaatgagcacattgcaggtctttggaaatgctgggaaggggttacattcaagtaactgctgacgtccttcctctctgtcagacccatgttggcctgtaattatatttttctgaatctaaaaacaaatagaaatttctgatatcttttcagtctccttcttttctttccattcatcacttaaatctcattattgtataacgtttcaaattatgacctggattgaaggaagtctgttttgtcagggactttgttagggtgaacatcagaatctca

SEQ ID NO: 281 - DNA, 2361 bp, Homo sapiens
  misc feature (45): n equals a,t,g, or c
  misc feature (2352): n equals a,t,g, or c
  misc feature (2355): n equals a,t,g, or c
gggtcgggtgaggcgcaaaaggataaaaagcccgtggaagcggantgatgcagatccgagccgggctggctgcagagaaaccgcagggagagcctcactgctgagcgcccctcgacggcggagcggcagcagcctccgtggcctccagcatccgacaagaagcttcagccatgcaggccccacgggagctcgcggtgggcatcgacctgggcaccacctactcgtgcgtgggcgtgtttcagcagggccgcgtggagatcctggccaacgaccagggcaaccgcaccacgcccagctacgtggccttcaccgacaccgagcggctggtcggggacgcggccaagagccaggcggccctgaacccccacaacaccgtgttcgatgccaagcggctgatcgggcgcaagttcgcggacaccacggtgcagtcggacatgaagcactggcccttccgggtggtgagcgagggcggcaagcccaaggtgcgcgtatgctaccgcggggaggacaagacgttctaccccgaggagatctcgtccatggtgctgagcaagatgaaggagacggccgaggcgtacctgggccagcccgtgaagcacgcagtgatcaccgtgcccgcctatttcaatgactcgcagcgccaggccaccaaggacgcgggggccatcgcggggctcaacgtgttgcggatcatcaatgagcccacggcagcwgccatcgcctatgggctggaccggcggggcgcgggaragcgcaacgtgctcatttttgacctgggtgggggcaccttcgatgtgtcggttctctccattgacgctggtgtctttgaggtgaaagccactgctggagatacccacctgggaggagaggacttcgacaaccggctcgtgaaccacttcatggaagaattccggcggaagcatgggaaggacctgagcgggaacaagcgtgccctgcgcaggctgcgcacagcctgtgagcgcgccaagcgcacccygtcctccagcacccaggccaccctggagatagactccctgttcgagggcgtggacttctacacgtccatcactcgtgcccgctttgaggaactgtgctcagacctcttccgcagcaccctggagccggtggagaaggccctgcgggatgccaagctggacaaggcccagattcatgacgtcgtcctggtggggggctccacwcgcatccccaaggtgcagaagttgctgcaggacttcttcaacggcaaggagctgaacaagagcatcaaccctgatgaggctgtggcctatggggctgctgtgcaggcggccgtgttgatgggggacaaatgtgagaaagtgcaggatctcctgctgctggatgtggctcccctgtctctggggctggagacagcaggtggggtgatgaccacgctgatccagaggaacgccactatccccaccaagcagacccagactttcaccacctactcggacaaccagcctggggtcttcatccaggtgtatgagggtgagagggccatgaccaaggacaacaacctgctggggcgttttgaactcagtggcatccctcctgccccacgtggagtcccccagatagaggtgacttttgacattgatgctaatggcatcctgagcgtgacagccactgacaggagcacaggtaaggctaacaagatcaccatcaccaatgacaagggccggctgagcaaggaggaggtggagaggatggttcatgaagccgagcagtacaaggctgaggatgaggcccagagggacagagtggctgccaaaaactcgctggaggcccatgtcttccatgtgaaaggttctttgcaagaggaaagccttagggacaagattcccgaagaggacaggcgcaaaatgcaagacaagtgtcgggaagtccttgcctggctggagcacaaccagctggcagagaaggaggagtatgagcatcagaagagggagctggagcaaatctgtcgccccatcttctccaggctctatggggggcctggtgtccctgggggcagcagttgtggcactcaagcccgccagggggaccccagcaccggccccatcattgaggaggttgattgaatggcccttcgtgataagtcagctgtgactgtcagggctatgctatgggccttctagactgtcttctatgatcctgcccttcagagatgaactttccctccaaagctagaactttcttcccaggataactgaagtcttttgactttttgsggggagggcggttcatcctcttctgcttcaaataaaaagtcattaatttattaaaaaaaaaaaaaaaaaaaaaaaaaaaaaaaaaaaccccggggggggnccnggaccc

SEQ ID NO: 282 - DNA, 1587 bp, Homo sapiens
ccatgcactccagcctgggtgacgagaagatccgtctcaaaaaaaaaaacaactcttatttaatttttagttaaaattaaaacactagtacttcagaatatagatacaagtacaccatcttgaagaatttggagtttttcagggcaattcaaatgacctcattttttgttctttttgtattccagacagtgtttctgtcattggatctctgattggtagtgttaataaatattctttcagtgtgagccagattcataaaattaattttcttcattttagtagtaaaaagtagtctaatagctttttgtcagcttgatttttktgtgtgtgtaatattcaagggcagaatgacaggacagataagcaataagaaatgtatagaattagaaaatatagtagttccctcttacccatgggacatacgttccaagacccccagtgaacgtctgaaaccatggatagtatagacacctctatacactgttttttcctatacatatatacctatgataaagttctatttataaatcagggacagcaagagataaacaataactgcaaatagaacaattataacagtgcactgtaataaaagtgatgtaaatgtgatatgtctgtctctttctctyaaaatatcttattgtactgtactcacctgtaatcagactgtggttgaccgtgagtaacccgaaaccacagaaagcaaaatcgtggataaggggagactactctatatgaaacttaagttacaaaattctctgaagcatttgaaactagacgttttggaattataaaatagtccctttaaaatatccactagtagaaaaaaacttcatttgcagagaaaagattgcaataaaactcattcctaaacttttcaattttataaaattaaacattctttttttatccgtattaacaatttctagttacatagtttctagttacatattaccatatattactctttatctacaaataaatagctgatactcaaactgatyatattttgattgttaaacacttggatctctcaatacttctgtaagttaaagtgaacttaaacagtttcttgaaaaactccagtaggtggcagaatacctattgaatattcgttgctatactttgctgtttgtcattaaaacatctctacccatattcttgcaaaataatatttatattttaatggataggaaaatgatttgcaattagatgtttccattcttgaaagaaaaaagctgcaaataacattttcaagaatataaaaaaatgagtaaacaaagggaaggttgtttggtcatttatagacaattaagcacagactgtagatgtccttccaattcttgggaggctaaactgagtctaccatttcttacatttcttttacctattttttgagaattgccagttgtacagtgtttagcatgtggaatgtaccaaatatatctatgttgtgacttaagatattctaaatgtggataacttctgacctaggaamcatgaagtttgtagtgaartaagtgaaaagaatgtccargaatttttttcccccaccctccagtgggcattatggggggtttattggag

SEQ ID NO: 283 - DNA, 1973 bp, Homo sapiens
  misc feature (48): n equals a,t,g, or c
  misc feature (1581): n equals a,t,g, or c
agttaataagtaaaagctactaacaattaaaaaataaataaataaagncaagactgtctggaaaatggctctcctaaaaggaccagttgccatcatccacagtggaagattcaaagcagttggtccttggtacgtatgagaagcggatttcattcccttgaattctacagagcagtttattagagtgaatgcattttaaggccttgcatttgatatgtcatccagttcataatcaagttgcctttttctggctaaaacataatgattatgtatttttctcatttggtcctacaagctgctggccctttgtccctccactgtgggaatcagatctagagcaggctgagcctgcagacacagcagtggccaaaaggtcactctaagtgttttgtcttgactccttacttgaagtccacccagctagcacacatctggtttatactgaagccccctgcctagaaatactcatttcaggaaccaccagtaagcatctgtgaccacacaggctttttgactgatggcttcccggatctggtttcaagggataaccccgtctgtgtgcatctatggtcttctctctacagcgaggactttgcagtgctgcttgtggtccacacaaggggctcagagctgagtctgaactgcttcatggtcaccagctcctgtcccttccagtcttgagaggcttttttctccagatggaacctttccttcccgccgttttctcggtctctggctgtttttctcttgtgcccgtctaattggacacctcctggcttccatctctgtggttctcctgcctcacttcctgttctgttgtttttccgttttgtcaaaatatctcctatgttcttggcttccttttcgtcgccaggttttcagctttcctttagctcttcttctaatatggcttctgcccacaaaagcctgctctgtcaggatctcatggttctccacttgccagaaccttcttcagcctcagttcctcggcctcaacttgtacgtttaacccattgaccaccaccccccaaattcaccttcatttctttgaccctgctcctcactccttttctgttgaggaatctgttgactaactccaggctcactcaggctcaccgtcctgctctctgcaccagcctttccagagcgtgccagttctcatggcttcatctgttaactgttgatcacttcagtcctgatttttagacctaaatggtttccttaacgccattctaactgcctgtgactcattttcacttacagtgtttattgtaacgccaaaccaacaaatcacaggtgcttgcttctctccataaatctccccagtctaactttttgtcattcaacatgactcgtttatccaacctgaaatcgcatatagccccaagtatggtgttttgtacacaggtatttaataagtgacttccagttttggctctgctatgaataaaaagagatttcagttctcttcactttgaaatctaacaactcagagaacattgaagaaattggaatttagttgggatgaaatacttgtggtttaaaatatttctgttcatattttctaatttgttgccggangtcttgggttttctatttgagtgcttgcaaactcaatgtgatttctgtcagcatatcttaggtttgtttgttatgaaacttaygcagtgtgaggttctatctgaaaatgttatttagctatcttctgggactatttaatgaaagtggggtcatgaatccttaaaattcttgtgcagctttgagaaacatttctgttatttgggtatcagtttgtaagtgtggtaaagccaagatggaaacgagcactttgctttcttggttgttgttactggtctaacctcctgcttgaactagtctgctgtcctgtcaaatgcatctttttatttacatgtcccttaaattaaagctgatcatgaaagtaaaaaaaaaaaaaaaawaaaaaaaaaaaaaaa

SEQ ID NO: 284 - DNA, 1062 bp, Homo sapiens
gggcacgagtttctgtcctccttcctggctcctccttcctccccacccctctaataggctcataagtgggctcaggcctctctgcggggctcactctgcgcttcaccatggctttcattgccaagtccttctatgacctcagtgccatcagcctggatggggagaaggtagatttcaatacgttccggggcagggccgtgctgattgagaatgtggcttcgctctgaggcacaaccacccgggacttcacccagctcaacgagctgcaatgccgctttcccaggcgcctggtggtccttggcttcccttgcaaccaatttggacatcaggagaactgtcagaatgaggagatcctgaacagtctcaagtatgtccgtcctgggggtggataccagcccaccttcacccttgtccaaaaatgtgaggtgaatgggcagaacgagcatcctgtcttcgcctacctgaaggacaagctcccctacccttatgatgacccattttccctcatgaccgatcccaagctcatcatttggagccctgtgcgccgctcagatgtggcctggaactttgagaagttcctcatagggccggagggagagcccttccgacgctacagccgcaccttcccaaccatcaacattgagcctgacatcaagcgcctccttaaagttgccatatagatgtgaactgctcaacacacagatctcctactccatccagtcctgaggagccttaggatgcagcatgccttcaggagacactgctggacctcagcattcccttgatatcagtccccttcactgcagagccttgcctttcccctctgcctgtttccttttcctctcccaaccctctggttggtgattcaacttgggctccaagacttgggtaagctctgggccttcacagaatgatggcaccttcctaaaccctcatgggtggtgtctgagaggcgtgaagggcctggagccactctgctagaagagaccaataaagggcaggtgtggaaaaaaaaaaaaaaaaaaaaaaaaaaaaaaaaaaaaaaaaaaaaaaaaaaaaaaa

SEQ ID NO: 285 - DNA, 1419 bp, Homo sapiens
  misc feature (148): n equals a,t,g, or c
ggcasgwgcagagctccacagctctctttcccaaggagtaatcagagggtgagaacgtggagcctggtggacaggtgaaagcactgggatctttctgcccagaaaggggaaagttgcacatttatatcctagagggaagcgacasagntgcttctccctgtgctgaggtacaggagccatgtggctagaaatcctcctcacttcagtgctgggctttgccatctactggttcatctcccgggacaaagaggaaactttgccacttgaagatgggtggtgggggccaggcacgaggtccgcagccagggaggacgacagcatccgccctttcaaggtggaaacgtcagatgaggagatccacgacttacaccagaggatcgataagttccgtttcaccccacctttggaggacagctgcttccactatggcttcaactccaactacctgaagaaagtcatctcctactggcggaatgaatttgactggaagaagcaggtggagattctcaacagataccctcacttcaagactaagattgaagggctggacatccacttcatccacgtgaagcccccccagctgcccgcagccataccccgaagcccttgctgatggtgcacggctggcccggctctttctacgagttttataagatcatcccactcctgactgaccccaagaaccatggcctgagcgatgagcacgtttttgaagtcatctgcccttccatccctggctatggcttctcagaggcatcctccaagaaggggttcaactcggtggccaccgccaggatcttttacaagctgatgctgcggctgggcttccaggaattctacattcaaggaggggactgggggtccctgatctgcactaatatggcccagctggtgcccagccacgtgaaaggcctgcacttgaacatggctttggttttaagcaacttctctaccctgaccctcctcctgggacagcgtttcgggaggtttcttggcctcactgagagggatgtggagctgctgtaccccgtcaaggagaaggtattctacagcctgatgagggagagcggctacatgcacatccagtgcaccaagcctgacaccgtagctctgctctgaatgactctcctgtgggtctggctgcctatattctagagaagttttccacctggaccaatacggaattccgatacctggaggatggaggcctggaaaggaagttctccctggacgacctgctgaccaacgtcatgctctactggacaacaggcaccatcatctcctcccagcgcttctacaaggagaacctggggacagggctggatgacccagaagcatgagcggatgaaggtctatgtgcccatggcttctctgccttccttttgagctattgcacacgcctgaaaatgggtgaggttc

SEQ ID NO: 286 - DNA, 1958 bp, Homo sapiens
gcaggccagccccatggggaagcgcagacgccggmgcctgggcgctctgagattgtcactgctgttccaagggcacacgcagagggatttggaattcctggagagttgcctttgtgagaagctggaaatatttctttcaattccatctcttagttttccataggaacatcaagaaatcatgaacaactttggtaatgaagagtttgactgccacttcctcgatgaaggttttactgccaaggacattctggaccagaaaattaatgaagtttcttcttctgatgataaggatgccttctatgtggcagacctgggagacattctaaagaaacatctgaggtggttaaaagctctccctcgtgtcacccccttttatgcagtcaaatgtaatgatagcaaagccatcgtgaagacccttgctgctaccgggacaggatttgactgtgctagcaagactgaaatacagttggtgcagagtctgggggtgcctccagagaggattatctatgcaaatccttgtaaacaagtatctcaaattaagtatgctgctaataatggagtccagatgatgacttttgatagtgaagttgagttgatgaaagttgccagagcacatcccaaagcaaagttggttttgcggattgccactgatgattccaaagcagtctgtcgtctcagtgtgaaattcggtgccacgctcagaaccagcaggctccttttggaacgggcgaaagagctaaatatcgatgttgttggtgtcagcttccatgtaggaagcggctgtaccgatcctgagaccttcgtgcaggcaatctctgatgcccgctgtgtttttgacatgggggctgaggttggtttcagcatgtatctgcttgatattggcggtggctttcctggatctgaggatgtgaaacttaaatttgaagagatcaccggcgtaatcaacccagcgttggacaaatactttccgtcagactctggagtgagaatcatagctgagcccggcagatactatgttgcatcagctttcacgcttgcagttaatatcattgccaagaaaattgtattaaaggaacagacgggctctgatgacgaagatgagtcgagtgagcagacctttatgtattatgtgaatgatggcgtctatggatcatttaattgcatactctatgaccacgcacatgtaaagccccttctgcaaaagagacctaaaccagatgagaagtattattcatccagcatatggggaccaacatgtgatggcctcgatcggattgttgagcgctgtgacctgcctgaaatgcatgtgggtgattggatgctctttgaaaacatgggcgcttacactgttgctgctgcctctacgttcaatggcttccagaggccgacgatctactatgtgatgtcagggcctgcgtggcaactcatgcagcaattccagaaccccgacttcccacccgaagtagaggaacaggatgccagcaccctgcctgtgtcttgtgcctgggagagtgggatgaaacgccacagagcagcctgtgcttcggctagtattaatgtgtagatagcactctggtagctgttaactgcaagtttagcttgaattaagggatttggggggaccatgtaacttaattactgctagttttgaaatgtctttgtaagagtagggtcgccatgatgcagccatatggaagactaggatatgggtcacacttatctgtgttcctatggaaactatttgaatatttgttttatatggatttttattcactcttcagacacgctactcaagagtgcccctcagctgctgaacaagcatttgtagcttgtacaatggcagaatgggccaaaagcttagtgttgtgacctgtttttaaaataaagtatcttgaaataaacaaaaaaaaaaaaggggggccgccctaggggttcccaagtttacgtacgctgcatgg

SEQ ID NO: 287 - DNA, 1230 bp, Homo sapiens
  misc feature (4): n equals a,t,g, or c
  misc feature (1012): n equals a,t,g, or c
cggnaagggaggtgagggttggggtatgctgacttgggagctgccagtctcctgatgggggctccatcataatgggtcatgaagtgggtgggccttggttgacagccatttattgaatgcttacagtctgttgagtccagttctgtgcctgtagtctgacagcaggggagtgaggtgagtcctgtcactgccttcctgttgtgcagaggtggagacagatacagggcagccaagtaacttgtctcagtttacamgcacagcttgtacascagaratttgaarccccttaatcggcctctccaccccyggatawtttcctcccataaatggaggtgatggtgtctgaaagtgcactgtaactggggcgctctggaaacagcctgttctcacaccactgatggctcactggacacttcctccttgcaggctcgtcagatcaacatccacaacctctctgcattttatgacagtgagctcttcaggatgaacaagttcagccacgacctgaaaaggaaaatgatcctgcagcagttctgaggccctatgccatccataaggattccttgggattctggtttggggtggtcagtgccctctgtgctttatggacacaaaaccagagcacttgatgaactcggggtactagggtcagggcttatagcaggatgtctggctgcacctggcatgactgtttgtttctccaagcctgctttgtgcttctcacctttgggtgggatgccttgccagtgtgtcttacttggttgctgaacatcttgccacctccgagtgctttgtctccactcagtaccttggatcagagctgctgagttcaggatgcctgcgtgtggtttaggtgttagccttcttacatggatgtcaggagagctgctgccctcttggcgtgagttgcgtattcaggctgcttttgctgcctttggccagagagctggttgaagatgtttgtaatcgttttcagtctcctgcaggtttctgtgcccctgtggtggaaganggcacgacagtgccagcgcagcgttctgggctcctcagtcgcaggggtgggatgtgagtcatgcggattatccactcgccacagttatcagctgccattgctccctgtctgtttccccactctcttatttgtgcattcggtttggtttctgtagttttaatttttaataaagttgaataaaatataaaaaaaaaaaaaaaaaaaaaaaaaaaaaaaaa

SEQ ID NO: 288 - DNA, 1637 bp, Homo sapiens
  misc feature (29): n equals a,t,g, or c
  misc feature (781): n equals a,t,g, or c
ggcacgagctcgtgccgaattcggcacgngagctgccggatccttcagcgtctgcatctcggcgtcgccccgcgtaccgtcgcccggctctccgccgctctcccggggkttcggggcacttgggtcccacagtctggtcctgcttcaccttcccctgacctgagtagtcgccatggcacaggttctcagaggcactgtgactgacttccctggatttgatgagcgggctgatgcagaaactcttcggaaggctatgaaaggcttgggcacagatgaggagagcatcctgactctgttgacatcccgaagtaatgctcagcgccaggaaatctctgcagcttttaagactctgtttggcagggatcttctggatgacctgaaatcagaactaactggaaaatttgaaaaattaattgtggctctgatgaaaccctctcggctttatgatgcttatgaactgaaacatgccttgaagggagctggaacaaatgaaaaagtactgacagaaattattgcttcaaggacacctgaagaactgagagccatcaaacaagtttatgaagaagaatatggctcaagcctggaagatgacgtggtgggggacacttcagggtactaccagcggatgttggtggttctccttcaggctaacagagaccctgatgctggaattgatgaagctcaagttgaacaagatgctcaggctttatttcaggctggagaacttaaatgggggacagatgaagaaaagtttatcaccatctttggaacacgaagtgtnctcatttgagaaaggtgtttgacaagtacatgactatatcaggatttcaaattgaggaaaccattgaccgcgagacttctggcaatttagagcaactactccttgctgttgtgaaatctattcgaagtatacctgcctaccttgcagagaccctctattatgctatgaagggagctgggacagatgatcataccctcatcagagtcatggtttccaggagtgagattgatctgtttaacatcaggaaggagtttaggaagaattttgccacctctctttattccatgattaagggagatacatctggggactataagaaagctcttctgctgctctgtggagaagatgactaacgtgtcacggggaagagctccctgctgtgtgcctgcaccaccccactgccttccttcagcacctttagctgcatttgtatgccagtgcttaacacattgccttattcatactagcatgctcatgaccaacacatacacgtcatagaagaaaatagtggtgcttctttctgatctctagtggagatctctttgactgctgtagtactaaagtgtacttaatgttactaagtttaatgcctggccattttccatttatatatattttttaagaggctagagtgcttttagccttttttaaaaactccatttatattacatttgtaaccatgatactttaatcagaagcttagccttgaaattgtgaactcttggaaatgttattagtgaagttcgcaactaaactaaacctgtaaaattatgatgattgtattcaaaagattaatgaaaaataaacatttctgtccccctgraaaaaaaaaaaaaaaggaggsgcccagaggacc

SEQ ID NO: 289 - DNA, 3308 bp, Homo sapiens
  misc feature (3255): n equals a,t,g, or c
  misc feature (3269): n equals a,t,g, or c
  misc feature (3282): n equals a,t,g, or c
gcggcacgagcgcccacsygtcctgcrgcactggatgctttgtgagttggggattgttgcgtcccatatctggacccagaagggacttccctgctcggctggctctcggtttctctgctttcctccggagaaataacagcgtcttccgcgccgcgcatggagcctcccggccgccgcgagtgtccctttccttcctggcgctttcctgggttgcttctggcggccatggtgttgctgctgtactccttctccgatgcctgtgaggagccaccaacatttgaagctatggagctcattggtaaaccaaaaccctactatgagattggtgaacgagtagattataagtgtaaaaaaggatacttctatatacctcctcttgccacccatactatttgtgatcggaatcatacatggctacctgtctcagatgacgcctgttatagagaaacatgtccatatatacgggatcctttaaatggccaagcagtccctgcaaatgggacttacgagtttggttatcagatgcactttatttgtaatgagggttattacttaattggtgaagaaattctatattgtgaacttaaaggatcagtagcaatttggagcggtaagcccccaatatgtgaaaaggttttgtgtacaccacctccaaaaataaaaaatggaaaacacacctttagtgaagtagaagtatttgagtatcttgatgcagtaacttatagttgtgatcctgcacctggaccagatccattttcacttattggagagagcacgatttattgtggtgacaattcagtgtggagtcgtgctgctccagagtgtaaagtggtcaaatgtcgatttccagtagtcgaaaatggaaaacagatatcaggatttggaaaaaaattttactacaaagcaacagttatgtttgaatgcgataagggtttttacctcgatggcagcgacacaattgtctgtgacagtaacagtacttgggatcccccagttccaaagtgtcttaaagtgtcgacttcttccactacaaaatctccagcgtccagtgcctcaggtcctaggcctacttacaagcctccagtctcaaattatccaggatatcctaaacctgaggaaggaatacttgacagtttggatgtttgggtcattgctgtgattgttattgccatagttgttggagttgcagtaatttgtgttgtcccgtacagatatcttcaaaggaggaagaagaaagggaaagcagatggtggagctgaatatgccacttaccagactaaatcaaccactccagcagagcagagaggctgaatagattccacaacctggtttgccagttcatcttttgactctattaaaatcttcaatagttgttattctgtagtttcactctcatgagtgcaactgtggcttagctaatattgcaatgtggcttgaatgtaggtagcatcctttgatgcttctttgaaacttgtatgaatttgggtatgaacagattgcctgctttcccttaaataacacttagatttattggaccagtcagcacagcatgcctggttgtattaaagcagggatatgctgtattttataaaattggcaaaattagagaaatatagttcacaatgaaattatattttctttgtaaagaaagtggcttgaaatcttttttgttcaaagattaatgccaactcttaagattattctttcaccaactatagaatgtattttatatatcgttcattgtaaaaagcccttaaaaatatgtgtatactactttggctcttgtgcataaaaacaagaacactgaaaattgggaatatgcacaaacttggcttctttaaccaagaatattattggaaaattctctaaaagttaatagggtaaattctctattttttgtaatgtgttcggtgatttcagaaagctagaaagtgtatgtgtggcatttgttttcactttttaaaacatccctaactgatcgaatatatcagtaatttcagaatcagatgcatcctttcataagaagtgagaggactctgacagccataacaggagtgccacttcatggtgcgaagtgaacactgtagtcttgttgttttcccaaagagaactccgtatgttctcttaggttgagtaacccactctgaattctggttacatgtgtttttctctccctccttaaataaagagaggggttaaacatgccctctaaaagtaggtggttttgaagagaataaattcatcagataacctcaagtcacatgagaatcttagtccatttacattgccttggctagtaaaagccatctatgtatatgtcttacctcatctcctaaaaggcagagtacaaagtaagccatgtatctcaggaaggtaacttcattttgtctatttgctgttgattgtaccaagggatggaagaagtaaatatagctcaggtagcactttatactcaggcagatctcagccctctactgagtcccttagccaagcagtttctttcaaagaagccagcaggcgaaaagcagggactgccactgcatttcatatcacactgttaaaagttgtgttttgaaattttatgtttagttgcacaaattgggccaaagaaacattgccttgaggaagatatgattggaaaatcaagagtgtagaagaataaatactgttttactgtccaaagacatgtttatagtgctctgtaaatgttcctttcctttgtagtctctggcaagatgctttaggaagataaaagtttgaggagaacaaacaggaattctgaattaagcacagagttgaagtttatacccgtttcacatgcttttcaagaatgtcgcaattactaagaagcagataatggtgttttttagaaacctaattgaagtatattcaaccaaatactttaatgtataaaataaatattatacaatatacttgtatagcagtttctgcttcacatttgattttttcaaatttaatatttatattagagatctatatatgtataaatatgtattttgtcaaatttgttacttaaatatatagagaccagttttctctggaagtttgtttaaatgacagaagcgtatatgaattcaagaaaatttaagctgcaaaaatgtatttgctataaaatgagaagtctcactgatagaggttctttattgctcattttttaaaaaatggactcttgaaatctgttaaaataaaattgtacatttggaratgtaaaaaaaaaaaaaaaaaaaaaaaaanaaaaaaaaaaaaanaaaaaaaaaaaanaaaaaaaaaaaaaaaaaaaaaaaaaa

SEQ ID NO: 290 - DNA, 2239 bp, Homo sapiens
  misc feature (2205): n equals a,t,g, or c
  misc feature (2238): n equals a,t,g, or c
ggacagcatgtgtccggcctccacacccagcgtactcagctctgagcaggagtttcagatgttccccaagtctcggctcagctccgtcagcgtcacctactgctctgtcagtcaggacttcccaggcagcaacttgaatttgctcaccaacaattctgggactgagtgggaagcccatcctgaccagctgctccgaggacccaggaaaggcaggattgaaaatgtccaggaaagtggccaagaagcagtggccttattgcatcccaaaccacgcctcttgaccaggctgcctcccttgtggcagcaacggcacagctaattctactcacagtgcttttaagtgaaaatggtcgagaaagaggcaccaggaagccgtcctggcgcctggcagtccgtgggacgggatggttctggctgtttgagattctcaaaggagcgagcatgtcgtggacacacacagactatttttagattttcttttgccttttgcaaccaggaacagcaaatgcaaaaactctttgagagggtaggagggtgggaaggaaacaaccatgtcatttcagaagttagtttgtatatattatwataatcttataattgttctcagaatcccttaacagttgtatttaacagaaattgtatattgtaatttaaaataattatataactgtatttgaaataagaattcagacatctgaggttttatttcatttttcaatagcacatatggaattttgcaaagatttaatctgccaagggccgactaagagaagttgtaaagtatgtattattyacatttaatagacttacagggataaggcctgtggggggtaatccctgctttttgtgtttttttgtttgtttgtttgtttgtttttggggggttttcttgccttggttgtctggcaaggactttgtacatttgggagtttttatgagaaacttaaatgttattatctgggcttatatctggcctctgctttctcctttaattgtaaagtaaaagctataaagcagtatttttcttgacaaatggcatatgttttccacttctttgcatgcgtttaagtcagtttatacacaaaatggattttattttttagtttaactgtgtttctccgacagctcacctctcyctgaccasccagccatttccttcctgtgctccacgttcttctgtgtgattaaaataagaatattatttttggaaatatgcaactccttttcagagatcaggagggatttatgtagcagctatttttactgcaaaagtaattcactggaaaaaaaatgtaatttgtaagaaagctttatttttatctcagctctatgtaaagttaaagttactgtacagagctgaaggacggggggcggtaggggtcttgatgaaacctcttgaacgaagcacagtttgtcccatctttgttcactcgtgtgtctcaaccatcttaatagcatgctgctcctttttgctcagtgtccacagcaagatgacgtgattcttattttcttggacacagactattctgaggcacagagcggggacttaagatgggaaagagaaagcatcggagccattcattcggagaaaacgttttgatcaaaatggagacttttgtagtcgtttcaaaagagcacctgagtcatgtgtattcccggcctttataaatgacccggtcaagttggtttcaaagtycgacaggcttgtctgtttactagctgcgtggccttggacgggtggctgacatctgtaaagaatcctcctgtgatgaaactgaggaatcgggtggccgggcaagctgggaagagcaaagccagagctgcgctgcctcaatacccacaaaagaccattcccagtatacataagcacaggatgtttttctcaagagggatgtatttatcacttggacatctgtttataatataaacagacatgtgactgggaacatcttgctgccaaaagaatcctaggcagtggctcattgtatgtgaggttgaaccacgtgaaattgccaatattaggctggcttttatctacaaagaaggagtttcatggggttcagcctaacagttatggaaactacagtccttataaaccattggcatggtaataaacagatcttaagtataaaaattttgtaattgggcctttactctctcaataataaagtattttgtttatataaaaaaaaaaaaaaaaaaccncgggggggggcccggtacccaattcgccctatng

SEQ ID NO: 291 - DNA, 1516 bp, Homo sapiens
  misc feature (2): n equals a,t,g, or c
  misc feature (19): n equals a,t,g, or c
  misc feature (26): n equals a,t,g, or c
  misc feature (27): n equals a,t,g, or c
gntccccgaatctccctgnacctcgnngaacccaaccccaacctgggaacctccccaaaagtgctggggattaaccaggcgtggagcccaaccacgccccggcctcttttttttttaagctgccaatctttttggaaggaatattcttacctctactttgtcaccttctactggctccttaactaaaatctgccatttggctctctggttaacagtcccttcctgtaaagtctaaaatcttaattctaaatccacagtttaattcacaagctagtacttgactttttttctgtatttgacatttttgacaacccctactttaaagatttattcccttgacttcttacattttgctcactcctgaaccaccccccaccttttggcctcttcatttattccttaaatgttattcctcagacctccattttttttttctctcttaatcacaacaccacttctcacgcttgggtaattttaattcagcagttcctaaatccttatctttagccagactcctcaatccatctgcctgttgcacttttcttggttgtcccagagacacctgtgtgtgtcttaaaacattcattctctgcaaaacctactctaatgcctgtgtcccttactttggttaattttagaaccattatattctaagttttctaggctcattcctctcctccaccttcccctatcatttagtgtctaagttttactgattttatctccacctctctgatacatcactctttcatcttcattgctattattaataaatacctacagtactaacctgcctcctatacctagctggtctcctctctgttgctcaatgttaccacagcaggctttctagaagcactctgacagtgttactccctaatatccttcagtgacttcaggaactttcaggagaaagccaaactcctctgtttggtgtacaaggtcttctgatgtgtttcctccaccgaatgttctggtgaaacagacttacacttcttcagaagccacatttggccaggcctcccgccttggtaaatgctgtactctttgcatcaagtgtgctagtcatccttccccacttggaaaattcctatgcatcttgcaggcctgacataagcatttcctctgtgaaacctcctttgctccactcaaggagagtcatctaacttccactttcgtgtcaccactgtaattacaacctacctctattgtatgtcacttaaatcgtactgtattgttttatttttcaaaagtctttactagaatgtgagctccttaagggcaggaaaaggaacctttttattttttgcatctccatagcatagtttttggcatatgaatgtttaataaatgtttgttgaataaattgattttaaagtgacatctttattatattagaggtcctacctatattccaaatactttcactcccttcactttacagcaagggtcagtagagtcccaaggatttgtagactttagggggtcaataaagctgaaattgtaaaaaaaaaaa

SEQ ID NO: 292 - DNA, 2209 bp, Homo sapiens
  misc feature (2128): n equals a,t,g, or c
  misc feature (2160): n equals a,t,g, or c
aaatattcttggttctwaaaatstatcacttttcaccttayacttratgtgtgaaaactataaaaacaatgtgtgaacccaggggttctaaaatacaagcatagattttatcagggtgttttgtcaaagcaggttattcagtgattcctccccaccattcttaagaacgttaaataatgctgttgtgttagctctgagtagaaaggaaaaagtaaaacctctgtttggaggtaatattgggttgaattctgactgcccctttctagctggacctttaacaaatcacccaatcttttttgtgtttctctaaagtcatttatacattaaatgtaattatagcaactgtggggttctgttgagaattaagagctaacactatatatgtaaagtttccagtactagtcccagaatttagaatatgctcaacacaaagtaaacagcattatataagtttatatttttgtgagttataaagtactttgatatattctcattaaatctgtaaatcacctctataagtaagtggtaataataaagcagatatttttgtccccatttaaaaaatgaagaaattaatgcttaatagggtggtaccctggaaaggatctgggaagtggtagaatttctggtctgtacttttacaaatggagcccttgggaggtgggttaggtaaaagaagctttttacttaacgttgtcttatttccagtctaattttacgctgtagcagaaccagatggctgagaaaattctggaactatggatcttgaccccaaggatatattattttattccaagaaagatcaggtaggcgaaaagatgacaggatacagagtcaatccataaactaaatatttataactgttctgaattatacagagtctaaaaatatgtgtcagctacttcattcctgtaaatactcttgctgtgktataaatatggcaagaaataaacatgaccaatatcmatagacttcttgaggctactataagttttgagraataagggttcaaaaaatwagratgctaacacttaagcacagactagagcttgcttgggtttcttcctgcattacaaggtaaaaatttgttaatgtttgtttttattcagcttgggaaagctttgtgccatgaatacgtcgcatttaataacaagcaacacacggcatatagaaataactttaattaaaaaacttacatagaagattataatatcagacgtgacaaagatttgagtttatttgcctggacaacttgggtttgtctggcttttgttttctttttctttaaaaataaatgtacagtaaaactacaagcaaaagtttgtcagtattgaattgaattttttaccccttaaaaggactagtataatttccaatctctaacaaaaacttagtgtcaaatctcacagataaggccaaatggcaratattttcagttatgtgggtagtacaacttgagtaaccttttttacatgacaaaaagtgagttatataaattgtcctcaactttcacataggaaaaaaatggtttaatagcttcaaaaggaattttctttcatgtatactcttcagtatccaatattgaagctttgttctttgaaaaattttaatttccaatctaggatgcaagcaagaatatatgtttatttgaatagagtaagctatggcaaagaatgaccaaattagctagaaatagaaatcagccagaattaactaatttcttgctaatctagaaatacaatcatcttttttttttttttcaaattttatactgatagggctttactgtttgtggctcattttaaaactggtgtcttctcttcatgagacacattaattggtaaaactcaaattgagttttcaaagatgtgatagtattaaagtgcaccaatatttgactcaaatttgcttgctttattttgttaggagtaaacagaaagtagcctgtgtttagtcccaaagatagcagtgattttgaataaaggagttttgtgttgcctggatatatgaatttctgtaaataacttctgttgggttaaacatgttaaaacaacaacaacaacaacmaaaaacttctgtctctatattcagggacggttcaggatggtccttttattggtgggaaccngtgtttttatctattctgcagcttacattcmngggggtggttcatacaggctttcccggggggatggggggtccattgccc

SEQ ID NO: 293 - DNA, 2071 bp, Homo sapiens
  misc feature (2046): n equals a,t,g, or c
  misc feature (2054): n equals a,t,g, or c
ctcagtggccctgagaccctagctctgctctcggtccgctcgctgtccgctagcccgctgcgatgttgcgcgctgccgcccgcttcgggccccgcctgggccgccgcctcttgtcagccgccgccacccaggccgtgcctgcccccaaccagcagcccgaggtcttctgcaaccagattttcataaacaatgaatggcacgatgccgtcagcaggaaaacattccccaccgtcaatccgtccactggagaggtcatctgtcaggtagctgaaggggacaaggaagatgtggacaaggcagtgaaggccgcccgggccgccttccagctgggctcaccttggcgccgcatggacgcatcacacaggggccggctgctgaaccgcctggccgatctgatcgagcgggaccggacctacctggcggccttggagaccctggacaatggcaagccctatgtcatctcctacctggtggatttggacatggtcctcaaatgtctccggtattatgccggctgggctgataagtaccacgggaaaaccatccccattgacggagacttcttcagctacacacgccatgaacctgtgggggtgtgcgggcagatcattccgtggaatttcccgctcctgatgcaagcatggaagctgggcccagccttggcaactggaaacgtggttgtgatgaaggtagctgagcagacacccctcaccgccctctatgtggccaacctgatcaaggaggctggctttccccctggtgtggtcaacattgtgcctggatttggccccacggctggggccgccattgcctcccatgaggatgtggacaaagtggcattcacaggctccactgagattggccgcgtaatccaggttgctgctgggagcagcaacctcaagagagtgaccttggagctgggggggaagagccccaacatcatcatgtcagatgccgatatggattgggccgtggaacaggcccacttcgccctgttcttcaaccagggccagtgctgctgtgccggctcccggaccttcgtgcaggaggacatctatgatgagtttgtggagcggagcgttgcccgggccaagtctcgggtggtcgggaacccctttgatagcaagaccgagcaggggccgcagtggatgaaactcagtttaagaagatcctcggctacatcaacacggggaagcaagagggggcgaagctgctgtgtggtgggggcattgctgctgaccgtggttacttcatccagcccactgtgtttggagatgtgcaggatggcatgaccatcgccaaggaggagatcttcgggccagtgatgcagatcctgaagttcaagaccatagaggaggttgttgggagagccaacaattccacgtacgggctggccgcagctgtcttcacaaaggatttggacaaggccaattacctgtcccaggccctccaggcgggcactgtgtgggtcaactgctatgatgtgtttggagcccagtcaccctttggtggctacaagatgtcggggagtggccgggagttgggcgagtacgggctgcaggcatacactgaagtgaaaactgtcacagtcaaagtgcctcagaagaactcataagaatcatgcaagcttcctccctcagccattgatggaaagttcagcaagatcagcaacaaaaccaagaaaaatgatccttgcgtgctgaatatctgaaaagagaaatttttcctacaaaatctcttgggtcaagaaagttctagaatttgaattgataaacatggtgggttggctgagggtaagagtatatgaggaaccttttaaacgacaacaatactgctagctttcaggatgatttttaaaaaatagattcaaatgtgttatcctctctctgaaacgcttcctataactcgagtttataggggaagaaaaagctattgtttacaattatatcaccattaaggcaactgctacaccctgctttgtattctgggctaagattcattaaaaactagctgctcttaaaaaaaaaaaaaaaaaaaaaaacccgngggggggncccggaacccattcgcc

SEQ ID NO: 294 - DNA, 1851 bp, Homo sapiens
  misc feature (1849): n equals a,t,g, or c
  misc feature (1850): n equals a,t,g, or c
  misc feature (1851): n equals a,t,g, or c
gtggggctctcagttctgcggaatttggtactcattaccgtattcgccgtactaagttggtttctgttagtcttaacagtctgttttcttttaaaagcatgtagggcttcattgccatgttctgtgggtgtttggcaggttaccgatggggaagattcytgtcacagaatcagcaataccatagtttttctacatgtgctcagctgggggtgtggacaggtaggggtggggaaagaagaggctctgcgttctgggggctttttcttctcctccccctacccggtttccctccctgttttcctacctctacggcaagcccaaagtgtcttcccgggagcccagcgcagcccccggctcttacccaggaccccgccccgtgctgagccttctgctgaggtccttgcgtggagcacactcattcctcggtttttcagcaaaacgcggccagtccccttctccactgctgcctcccagcagagggccccaggatctccaaggtcccagctatggctttggacaacgtggcttcggcccctggggttgcagagcttgcattgggtttacctcggtctcattcattcatggagccaagggtggggtttcacctgcgaacatcagactgacttgctggcgtcaagagcagttgactcactgatgaaggccctggtgaggagaaagcactctgttcttcgcctactctgtaatcgttttgtcataatgagccatgaaaaaagtaatgaacttgtgctgttaatcgtcactgtaatgagaagtcttacgtacaacatagctgtggtggctgcgtggtttaatggctgcattagataggatcctcacatcccattcagaaccaaaactgatacagtgaaacaattaaggtgagcaaatagttttaacttttctttttttttttaagtttcattcttcctagaatatttttctaacaatttttatttcagctttaaagatgggtcatatagccaaacgggccatataatccaacattgttgagatgtcttaggacatctaaggcaaaactggcacatttgttctgcagactattgcaggaatgttttttcctagcatttctatattatctgtccattctgaggaaccagtgaatgtcctataaatgcacctcctgtcaaaaccatgcctgagaggtcccggctgggagtgacagggtgcttcttagattctattggtccttctctcattctccgaacttactcctttttatgggtaagtcaactaggtttacagtcccttatttttaatgcctaagttttgacagcaggaagaaaacaattttttaaaaattctcattacatagacgcacaagaatatgtcacataaagaaaatgtgtttagaatactggttttctatttacgcatgatattttcctaagtaaaattgccaagtggacttggaagtccagaaaggaaaataatttaaattaatgctggtgatcttaacaatattttgtaaaatgatgcttcccccttctccatggtctagtcaattttgtacaattaggtatctgactttacaagtttgttatcctttctaatttttactgaactgaaagcacaaagaagactacacagaaaatctggaaacagttgcaggtgttgggaggaagatgaaatcgagctgtcttttaacttttgtatgtgttttatcagaatttgctggactatgctggcaaggactttgtttacgatcaaattgtactagtgtctgcagggtttgtcagtactcgtcaaagccaagtccaattaaaaaaaaaagtctttgccctccaaaaaaaaaaaaaaaaaaactcgagggggccccgtaccctttcgnnn

SEQ ID NO: 295 - DNA, 2998 bp, Homo sapiens
  misc feature (1): n equals a,t,g, or c
  misc feature (11): n equals a,t,g, or c
  misc feature (16): n equals a,t,g, or c
  misc feature (195): n equals a,t,g, or c
  misc feature (2967): n equals a,t,g, or c
  misc feature (2971): n equals a,t,g, or c
  misc feature (2977): n equals a,t,g, or c
  misc feature (2981): n equals a,t,g, or c
ntttcagtcancctgntaagccaagctgaattctcattgccactggtgaaagacccacgttacttgggcatccctggtgacaaagaatactgcatcagcagtgatgatcttttctccttgccttactgcccgggtaagaccctggttgttggagcatcctatgtcgctttggagtgcgctggatttcttgctggnaatggtttagacgtcactgttatggttaggtccattcttcttagaggatttgaccaggacatggccaacmaaattggtgaacacatggaagaacatggcatcaagtttataagacagttcgtaccaattaaagttgaacaaattgaagcagggacaccaggccgactcagagtagtagctcagtccaccaatagtgaggaaatcattgaaggagaatataatacggtgatgctggcaataggaagagatgcttgcacaagaaaaattggcttagaaaccgtagggtgaagataaatgaaaagactggaaaaataccgtcacagatgaagaacagaccaatgtgccttacatctatgccattggcgatatattggaggataaggtggagctcaccccagttgcaatccaggcaggaagattgctggctcagaggctctatgcaggttccactgtcaagtgtgactatgaaaatgttccaaccactgtatttactcctttggaatatggtgcttgtggcctttctgaggagaaagctgtggagaagtttggggaagaaaatattgaggtttaccatagttacttttggccattggaatggacgattccgtcaagagataacaacaaatgttatgcaaaaataatctgtaatactaaagacaatgaacgtgttgtgggctttcacgtactgggtccaaatgctggagaagttacacaaggctttgcagctgcgctcaaatgtggactgaccaaaaagcagctggacagcacaattggaatccaccctgtctgtgcagaggtattcacaacattgtctgtgaccaagcgctctggggcaagcatcctccaggctggctgctgaggttaagccccagtgtggatgctgttgccaagactgcaaaccactggctcgtttccgtgcccaaatccaaggcgaagttttctagagggttcttgggctcttggcacctgcgtgtcctgtgcttaccaccgcccaaggcccccttggatctcttggataggagttggtgaatagaaggcaggcagcatcacactggggtcactgacagacttgaagctgacatttggcagggcatcgaagggatgcatccatgaagtcaccagtctcaagcccatgtggtaggcggtgatggaacaactgtcaaatcagttttagcatgacctttccttgtggattttcttattctcgttgtcaagttttctagggttgaatttttttcttttttctccatggtgttaatgatattagagatgaaaaacgttagcagttgatttttgtccaaaagcaagtcatggctagagtatccatgcaaggtgtcttgttgcatggaagggatagtttggctcccttggaggctatgtaggcttgtcccgggaaagagaactgtcctgcagctgaaatggactgttctttactgacctgctcagcagtttcttctctcatatattcccaaaacaagtacatctgcgatcaactctagccaaatttgcccctgtgtgctacatgatggatgattattattttaaggtctgtttaggaagggaaatggctacttggccagccattgcctggcatttggtagtatagtatgattctcaccattatttgtcatggaggcagacatacaccagaaatgggggagaaacagtacatatctttctgtctttagtttattgtgtgctggtctaagcaagctgagatcatttgcaatggaaaacacgtaacttgtttaaaagtttttctggtagctttagctttatgctaaaaaaaataatgacattgggtatctatttctttctaagactacattagtaggaaaataagtcttttcatgcttatgatttagctgttttgtggtaattgctttttaaaggaagttattaatatcataagttattattaatattttgaacacaggtggatgtgaaggattttcatttaaaaaccaagtggttttgactttttctgttgaatgaacaactgtgccttgtggaatttttgcagaagtgtttatgctttgttagcatttcaacttgcattattataaagaggtattaatgcctcagttatgtgtttgtcaatgtactggctgaggattctatctcagctgtcttttctaactgtgtaggttgagttttgaacacgtgcttgtggacatcaggcctcctgccagcagttcttgaagcttctttttcattcctgctactctacctgtatttctcagttgcagcactgagtggtcaaaatacatttctgggccacctcagggaacccatgcatctgcctggcatttaggcagcagagcccctgaccgtcccccacagggctctgcctcacgtcctcatctcatttggctgtgtaaagaaatgggaaaagggaaaaggagagagcaattgaggcagttgaccatattcagttttatttatttatttttaatttgtttttttctccaagtccaccagtctctgaaattagaacagtaggcggtatgagataatcaggcctaatcatgttgtgattctcttttcttagtggagtggaatgttctatccccacaagaaggattatatcttatagacttgtcttgttcagattctgtatttacccattttattgaaacatatactaagttccatgtatttttgttacaaatcttctgaaaaaaaacaaaacaatgtgaaacattaaaattaaaaggcattaataataaaaaaaaaaaaaaaaaaaactccgggggggggccggtacccaanttgncccatngggnggcgggttaaaattcac

SEQ ID NO: 296 - DNA, 1282 bp, Homo sapiens
  misc feature (3): n equals a,t,g, or c
  misc feature (1278): n equals a,t,g, or c
  misc feature (1281): n equals a,t,g, or c
ttncaaaaagctatttaggtgacactatagaaggtacgcctgcaggtaccggtccggaattcccgggtcgacccacgcgtccgcacggtgctatgtgagctcattaatgcactgtaccccgaggggcaggccccagtaaagaagatccaggcctccaccatggccttcaagcagatggagcagatctctcagttcctgcaagcagctgagcgctatggcattaacaccactgacatcttccaaactgtggacctctgggaaggaaagaacatggcctgtgtgcagcggacgctgatgaatctgggtgggctggcagtagcccgagatgatgggctcttctctggggatcccaactggttccctaagaaatccaaggagaatcctcggaacttctcggataaccagctgcaagagggcaagaacgtgatcgggttacagatgggcaccaaccgcggggcgtctcaggcaggcatgactggctacgggatgccacgccagatcctctgatcccaccccaggccttgcccctgccctcccacgaatggttaatatatatgtagatatatattttagcagtgacattcccagagagccccagagctctcaagctcctttctgtcagggtggggggttcagcctgtcctgtcacctctgaggtgcctgctggcatcctctcccccatgcttactaatacattcccttccccatagccatcaaaactggaccaactggcctcttcctttcccctgggaccaaaatttaggggcctcagtccctcaccgccatgccctggcctattctgtctctccttcttccccctggcctgttctgtctctgagctctgtgtcctccgttcattccatggctgggagtcactgatgctgcctctgccttctgatgctggactggccttgcttctacaagtatgcttctcccacagctgtggctgcaggaacttaatttatagggaggagcctgtggcagctgctgccccagccacagctgcactgactgtgctcaccacacatctggggcagccttccctggcaggggccctcgtggcttctcattttccattcccttcactgtggctaaggggtggggtgaggggatggagagggagggctgcctaccatggtctggggcttgaggaagatgagtttgttgatttaaataaagaatttgtcatttttgaaaaaaaaaaaaaaaaaaaaaaaaaaaaaaaaaaaaaaaaaaaaaaaaaaaaaaaaaaaaaaaaaaaaaaaaaaaaaaaaaaanaana

SEQ ID NO: 297 - DNA, 678 bp, Homo sapiens
cggaattcccgggtcgacccacgcgtccggaggaaacaaaccaccctctgggggtagtttacagactgagtgacagtactcagtatatctgagataaactctataatgttttggataaaaataacattccaatcactattgtatatatgtgcatgtattttttaaattaaagatgtctagttgctttttataagaccaagaaggagaaaatccgacaacctggaaagatttttgttttcactgcttgtatgatgtttcccattcatacacctataaatctctaacaagaggccctttgaactgccttgtgttctgtgagaaacaaatatttacttagagtggaaggactgattgagaatgttccaatccaaatgaatgcatcacaacttacaatgctgctcattgttgtgagtactatgagattcaaatttttctaacatatggaaagccttttgtcctccaaagatgagtactagggatcatgtgtttaaaaaaagaaaggctacgatgactgggcaagaagaaagatgggaaactgaataaagcagttgatcagcatcattggaacatggggacgagtgacggcaggaggaccacgaggaaataccctcaaaactaacttgtttacaacaaaataaagtattcactaccaaaaaaaaaaaaaaaccctctaaaaaa

SEQ ID NO: 298 - DNA, 1682 bp, Homo sapiens
ggcgccccccccctttgtccagctgggacacgaggccgcgggctcctccccctcccctccagcctctccaccagcccctccagtcaaccctcatcgccgtgcccccccagagctagagagatggggcccctgcgtggcccgaggggyagagctgggcgtcacttcgcaagcgtcctgccctgccggggcgcgggggtgggctctggggaagccggtgcgccccccacgcctccgctgccagtgccttacattctggagcgacccccctccctggtgcctcccagcgaagggggaccgccgtttgcactttcatcgcctaccccgacgsggggcccagytgcgggamgtgcatcacggctgggcccccagaggagagaggaggccgacgccagcggtccccgctcggaacggggagggttttcggggggttcggcgtcgcaccttggggccccccgcagccgtgtagggggcctcccatctgctaagcgtttttccgttgagccgctccaaaaacactaagctggggacgccaggtgcccccccaccccggctccctggccctatccacacctccacccccaccccaggatcgccatctttaggggaggcctgggagggggtgttaggtgttttagggccaccgagctcaaacacaaggacccctccccggcccacccagcccagccccaactgacctccatgcctagggaaaaactccccccaccactgccccctcccccgacccaggccaaagccagggcaggtctccgggtctcacctgctcctagcctcacccccctgcccccgaaaaccagactctcctcccaaactagcctcaggagcttggcgaacccgctcgctcctaaagagaaagacccaggaccctcccccatcacccccaagagaggttcgccatcctctggcctcgagcccttggtccctccgtccgtctgtcctcggggcccgctcccccggtggcccttggggatcaaagcgtgggccgctctccgggagggcgggcgggggagggggtggtcgggttgtgccattggggtgtccggaagcttctcagccagggtgggggtcgtggagtgggggagggaggccagccgggctccagaggggtcagggcgcgacgagaaccaactctttacctaactttgcatggtgcttagtcaaggactcctgcgacctggctcccgaggtcagctggcggcgctgacacacatgcatggcagactatccctggctctatctccctgttcctcgccccctccaccccccacttcctctttaaaaaaaaaaaaaaaaaaaaaaaagatacaagaaaaacctttaaaaaaattccatgtttcctaatttgcacgaaattttctaccacaagatgtgccttgccttccgagaataagtattacctttaaacaatatcagcgcacacacatagctgcatgttctgctcgtgtagtttaaaaaaaaaaagacaaaacagtgacatgaaataaaaaataaaaattgaaaagggatgtatttctatttgtaaaaaaaataaaataaaaaataagaaagtgagaatctaaaaaaaaaaaaaaaaaaaaaaaacgsgaggccaactgaccttataaccctytgmaccttcaaaaagattcatggtttttaattsctgcttttaataacatttgtta

SEQ ID NO: 299 - DNA, 1594 bp, Homo sapiens
  misc feature (1550): n equals a,t,g, or c
  misc feature (1592): n equals a,t,g, or c
gctcatgcctgtcatcctagcactttgggaggccaaggcaggtggatcacttgaggtcaggagaccagcccggccaacatggtgaaaccccatctctactaaaaatacaaaaattagctggaaatcgcttgaacctgggaggtggaggttccagtgagccgagatcgtggcactgcactccaacctgagcaacagagtgagacaccagctcaaaaaaaattttttaataataataaaagtcctattattcaactggttatgtacattatggttgaaagggaacgttttaatccagtctcaatccagggcaatagaattacaaagcatgttgtatttcagttcaaatggtattgtattataaaattacagttacattttcctttckgtgatcttcagcataatttcccagaggcccctttttcctccctataggccatcttattaacagattttaaaatttatagtaatgacaaatgacttatcagtgttcatcatctgaaagctaagtggttcgttcaatcactttttcaaagttgatagtagattgcatggtttcatktttcctcatattggtttattaattctatttaatcaaggaaaataacttcagattccataaagtttcagtttatttttagtttactactaggtgagatagcacattacatacttttactatcaaatattattttagcagcttcccatagtaccaaatgatttgattccctactctcatttyttaaagcatataaatatttatgggcttaaaaagggggtttttaaaaactgaggatatcagtaataaattgcagaatattttgcaaagctttcttttggaaagcaaacttttgtgcctgcctatatgcaaagtattttatcagggacttgaacaaagacctcactctttttcacttgtcttatgtcgagagaaaaggttattggcagccacattcctaagactggggaatggtgtgtccttttaaatttgaagatractttaggtaattatggaaactcctcaaagaggagaaagtaatttttttccagacatttttctcattctgtgtctttcacacactagtttccatagttcgagaattctgttttttaccattgggctgtgaatgttcacaatatcagtcctgttgaattcctatgaggtaatcacaatgtgtatatgttcattttctaggtatgataaaagaatgtatggctttttattctgtggaagtaaaatcctgaacgtttacaacttttccttaacttgtaaataaaaaattgtaagttttttctttttttacagaaaacttagcttgtgtaattctgttagtttcagatttctctcctgtttttgcaaattgtgggaaagattgacaatgcaaatgtgtcaaagacatactgttgggtgcaatattaacaattttaaatgcaaatttctttggataaattatttctatattctgtaaatctgagatttaatgtatattttgtttaaaaaaatgatttagtaaaatctttgaaaagtatgatcttctaaagtatttwaaaanaaaaaaaaaaaaaaaaaaaaaaaaaaaaaaaaaaaaaaaaanaa

SEQ ID NO: 300 - DNA, 1102 bp, Homo sapiens
  misc feature (1057): n equals a,t,g, or c
  misc feature (1070): n equals a,t,g, or c
gcccaccaggctgcgcaaacggccctccagccagactaacccctccccatcctcctccagggtccgggaccctgttcaagaacgccgagcgaatgctacgggtgcgcacctggacaagctggaccagggccgtctagtggacctggtcaacgccagcttcggcaagaagctcagggacgactacctggcctcgctgcgcccgcggctgcactccatctacgtctccgaggggtacaacgccgccgccattctgaccatggagcccgtcctggggggcaccccgtacctggacaaatttgtggtgagctccarccgccagggccaaggctccggccagatgctgtgggagtgcctgcggcgggaccttcagacacttttctggcgctcccgggtcaccaaccccatcaatccctggtacttcaaacacagtgatggcagcttctccaacaagcagtggatcttcttctggtttggcctggctgatatccgggactcctatgagttggtcaaccacgccaagggactgccagactcctttcacaagccagcttctgacccaggcagctgaccttcaccatggacactacaggccctggaatggccagggtggaccaaaagccatgccagctgggcatgaccccaggcagccagccacaggctgaagggggcttgttggctgagtgatctgcagaggagaaagcagccccagctctgcccagaggaggcgctgaagtgggacaagcacaggaaagaaggggaccagtctaggaccccaacttgactcactctaaagctacaaccaaatggccttcgattttcaacctggggattaggggaggggagggtgccttccagggctctactcaggactaaccctaagggtgagctagtttctgtgcctctgtgctatgttttgaggctcccttacccaaaataatacccctgcctgcgtgatattctaccattcattttaattcctttgggtcttgcagtttttcaggargccttgattaaaatgcaaatacttgtctgaaaattccgcttacactttgaaaanaaaattaaaattnacccccttggaaacaaaatttttttttttttt

SEQ ID NO: 301 - DNA, 1089 bp, Homo sapiens
  misc feature (44): n equals a,t,g, or c
  misc feature (1043): n equals a,t,g, or c
  misc feature (1073): n equals a,t,g, or c
ccttttgcccttttgtaaactctgaaggttagtcagtggttttnttcaaaattgcattaggaaatttcccaagggcatccttttaaggcagctgtctctgtacccttggaggccatcagtaaatgtttccaatctatagcagaggtagttatggaggaggtgatggtggatataatggatttggaggtgatggtggcaactatggcggtggtcctggttatagtagtagagggggctatggtggtggtggaccaggatatggaaaccaaggtggtggatatggtggaggtggaggatatgatggttacaatgaaggaggaaattttggcggtggtaactatggtggtggtgggaactataatgattttggaaattatagtggacaacagcaatcaaattatggacccatgaaagggggcagttttggtggaagaagctcgggcagtccctatggtggtggttatggatctggtggtggaagtggtggatatggtagcagaaggttctaaaaacagcagaaaagggttgaatgagaaccctacttgcctaaatgaggaatgtctttcctaccatctaaaatacgaaggtttctggctgggtaaggtttgtagttgacagtaaaacctgatgacaccatttgtttccctgcaagtctacattacatatttcacaactttgtccctctctagtaggcacattggaaaaattcttcaactgaaaactaccttggtaccatgtcctacacgttttaaaccttagttttaaaaattcccctgcgaaatagccataagtattcatatcaagtcagttgtgactccttgtgtatacaattcattttttgtgtcttcagggtaaactcaatttttggtaaagtggtttcagcttttgtgaaaaccgtttttgtgtgtaagcatgacacacaacagactcagtaagctgcccatcctcatactagggaaaacaccttcaaagggaacattaaaagttaccrgggccrggcacatggctcacgcctgtaawtcccmgcattttgggggggctgngggcagtggggttccccaaggtccgggggntttttgaggacgaggc

SEQ ID NO: 302 - DNA, 1284 bp, Homo sapiens
ggccccattccccgaattttggacacctcttgtggataaatctccaggggagcgccatagattagaacccccttgaaaacctttgtgagaaagtagggaacaaattctccctgtgacttctggctttgaaggtgttccagggtttaagttggaaagccccctttctgtgcccaaraggwgtctwaggamcagcttccacccatgrstgaagacttccttctggatgctttgtctgaggacttctctggtccacaaaatgcttcatctccttaaatttgaagatgctaaacttgctgctgccatctctgaagtggtttcccaaaccccagcttcaacgacccaagctggagccccaccccgtgatacctcgcagagtgacaaagacctcgatgatgccttggataaactctctgacagtctaggacaaaggcagcctgacccagatgagaacaaaccaatggaagataaagtaaaggaaaaagctaaagctgaacatagagacaagcttggagaaagagatgacactatcccacctgaatacagacatctcctggatgataatggacaggacaaaccagtgaagccacctacaaagaaatcagaggattcaaagaaacctgcagatgaccaagaccccattgatgctctctcaggagatctggacagctgtccctccactacagaaacctcacagaacacagcaaaggataagtgcaagaaggctgcttccagctccaaagcacctaagaatggaggtaaagcgaaggattcagcaaagacaacagaggaaacttccaagccaaaagatgactaaagaaatacaagttaaggtatctggtatctgcatgtaaaatcttcagctggtggatggtgacttttgaagaacaaaaggctttggcaacagaaaacaattgttctgggtgatttctagaatggtttttgttgagtctctgaacatcctaaatattggtttgttattcttttccagaaagaaaatgaatttgactggttcacctgtgtactgagtattgataaactttgaatttttttaattgccttcaattgggagagaaagctttatatttgtaagaaatatatttgataaagtttcttaaagcaacaccaaaaaaacaaaagaaaagctaagtgaatttttgcacattctacacacagtgcctgtaaatctcatttgtattttcagtttgcccttaattttttttgttagtgtttagaaaacaatgttttaaacattaaaaaaaaaaaaaaaaaaaaaaaaaaaaaatt

SEQ ID NO: 303 - DNA, 1109 bp, Homo sapiens
  misc feature (24): n equals a,t,g, or c
  misc feature (638): n equals a,t,g, or c
cagagccggggccccgggcccgtnacagacgggcgaggaagggagagaggcggcggcgacaccatgtcatctcccagtccgggcaagaggcggatggacacggacgtggtcaagctcatcgagagtaaacatgaggttacgatcctgggaggacttaatgaatttgtagtgaagttttatggaccacaaggaacaccatatgaaggcggagtatggaaagttagagtggacctacctgataaataccctttcaaatctccatctataggattcatgaataaaattttccatcccaacattgatgaagcgtcaggaactgtgtgtctagatgtaattaatcaaacttggacagctctctatgatcttaccaatatatttgagtccttcctgcctcagttattggcctatcctaaccccatagatcctctcaatggtgacgctgcagccatgtacctccaccgaccagaagaatacaagcagaaaattaaagagtacatccagaaatacgccacggaggagtttttcttacataatttgcaatttcaggaatttaatttataggcagatctttaaatacagtcaacttacggtgcacagtaatatgaaagccacactttgaaggtawtaaatacacagcntgcagactgggagttgctagcaamcaaatggcttacttacaaaagcagcttttagtycagacttagtttttataaaatgggaattckgacttmcttaaccaggtttgggatggagatggtctgcatcagctttttgtattaacaaagttactggctctttgtgtgtctccaggtaactttgcttgattaaacagcaaagccatattctaaattcactgttgaatgcctgtcccagtccaaattgtctgtctgctcttatttttgtaccatattgctcttaaaaatcttggtttggtacagttcataattcaccaaaagttcatataatttaaaaaaacactaaattagtttaaaatgaagcaatttatatctttatgcaaaaacatatgtctgtctttgcaaaggactgtaagcagattacaataaatcctttactttaatcaaaaaaaaaaaaaaaaaaaaaattctgcg

SEQ ID NO: 304 - DNA, 588 bp, Homo sapiens
  misc feature (572): n equals a,t,g, or c
  misc feature (577): n equals a,t,g, or c
  misc feature (585): n equals a,t,g, or c
tttttttttaatttccatatgggctaaagaatccaaatattttaaaaatctgtctctcttttcttctctcataaagtgaattattccttttttttgttttatgtaagtgtatatattcttagtttttcttgaaatcattgtaatgttaactttgttgtttcaaatatcttggtgattgcttcattatctcttcaacaaaaaaaacctttaattttgccattgaaactgtagaactatgccatgcttttattagaagcagtgctctgtgttaacaacaagaatggtgtaattagaattgggatgtggatatttactgtatgacaacacatttacagttctgtaatgcaaggatgcagtttaaaaatgtgaagtagtgatggtttttgaaataagctttaaaatatagggatcttgaaggctccctggggtaactattttataacttagataaaatggctagtcatatctgtgtgtttgtaaagttatttttttaatattttaagrttacaattttaacaatgtagraatgagccaaacttttaaattkaaaacagtaaracaaatggaaaccnatagntcacaaantcc

SEQ ID NO: 305 - DNA, 2019 bp, Homo sapiens
  misc feature (1979): n equals a,t,g, or c
  misc feature (1990): n equals a,t,g, or c
  misc feature (1995): n equals a,t,g, or c
  misc feature (2001): n equals a,t,g, or c
ggtttttgttgagtcyctgamcatcctaaatattggtttgttattcttttccagaaagaaaatgaatttgactggttcacctgtgtactgagtattgataaactttgaatttttttaattgccttcaattgggagagaaagctttatatttgtaagaaatatatttgataaagtttcttaaagcaacaccaaaaaaacaaaagaaaagctaagtgaatttttgcacattctacacacagtgcctgtaaatctcatttgtattttcagtttgcccttaattttttttgttagtgtttagaaaacaatgttttaaacattcttcagtgttctgatttcttattaccccctttcctcttgggcttttgaactgtatttgatgttgctttgggataatgtttataagtcaaacataagatattgtacattgggcacatatctcctcttgggctgctaataataaattaataacaggtaacctggacaaaccaggaagcaccaaaccccttttcagtttgaactcttctttgccaggtgtgaggacttctgcatcttacagtcagcacagaacacactgagacttgaatcaagtcagcaacagagcaaaataaaggttagataagtccttgtgtagcaaatttcgagcataagaaataaaatctaattaattcttagggtactcatctgacttgaactctgttggtttactgtgttagtaaactgtgctttctattatctatacataaaacctgagcagcaactgtgtctttagagctattgccacattagcctttgcactgtatagcgtctggctttatggaacttaagtttaccaaatataaaaagaaacttctgcttttaaaaaaattatatatatatattaaatttgaaacctgcatttctcccacagcaatgtaagaagtaggctctgatgtcctaccactttgaatggttttctaatatcttaatgaatagttcctgaacattgcactgatatcatcgattagaattttgatatttaatttcatctttatttcctggtagagaatgcaggaaaagatgtcaggtacataacataaaacagattgggaatttattgtttccaaagggcatggccttccttagcatcagtttgaagcttttgttatgacttagctgacttgtggcagcggggcaagcaaaaacaataacactgcttataaatggcaccacatcttgttaacctcccccccaaatactctctgaaagtcatgcacatacctatgggattttacacaccaccagcttaaaatgctatgtctctatccatcagaaatagtcattattctatttttaaggcagcaacaagaaaagaaaaaacacttttcctgagggatttctaaccatgtatctaatcctcccatttgggcagtataggtgtttgcttttttgttttctttttttaagaaaaaccttgaaacctttgacactgacagatgtgtttgcaaggatacggctkcagtattactaatttccatgtgtatctggaagtatttttaaatggcataccaaaatccagaagtttaaagatgcctataaaagtaaacaacatttatttaaaaagaactctgaatatgccttcttttttaattagaaatatcttcgagacttgggtgtttgttaataactaataactggagtaagctacaggatctaaagcagccctttttacagtctagttaggagagagaaaataattgcaaatatccacttagaggcaaagaacaattttttwttatcaaaaaggtttctgcacattgttgtggcaatattgtatctgtttagaaaatgggcttttccaaaagcaaacaaagataggttcctcaggtgaccaaaactgaaaatcaatatttccatgtttcattaatcaaggcataaaatacaattaaagcaaaatattttacattaaaaaaaaaaaaaaaaaaagggcggccgctcttaanaggatcccaanctttnccgtancgccttccattgccaaag

SEQ ID NO: 306 - DNA, 3317 bp, Homo sapiens
ctgcaggtaccggtccggaattcccgggtcgacccacgcgtccgctgtgaggcaggcagaaatgctcgatgacctcatggagaagaggaaagagaagcttgattctgtgattgaattcagcatcccagactctctgctgatccgaagaatcacaggaaggctgattcaccccaagagtggccgttcctaccacgaggagttcaaccctccaaaagagcccatgaaagatgacatcaccggggaacccttgatccgtcgatcagatgataatgaaaaggccttgaaaatccgcctgcaagcctaccacactcaaaccaccccactcatagagtactacaggaaacgggggatccactccgccatcgatgcatcccagacccccgatgtcgtgttcgcaagcatcctagcagccttctccaaagccacatcctagtatcagaaggccaggcgagactgcaacactgctcatcaccccgcggcgtgatccctgctcttaggtgctgggcagaggggaagggtggtcagggtgaggatggtgagggagggctggtgaggggctcagaggaatacttggaacaacagcagtgttattgtagtgtggcagtttcttttatacataggtgagagtttttaaagtgtaagggaaaaattaattttttaaaaaacaccatgcttggagggtgggggtagaaatagacacaatattatttctaaggaatcgggttttcatttactctggactggtgaaaatattttttaaagccagtgctctaagacctcagcttttatctcagaaccccatgggttccagaccaagagtacaggaaatcaaattgttgtcctgtctgtctatagcttggaacagggagctttgattactgactccggttccacacactgtaagatcaaaaaaccatctccacatttgaaagagatgtaaggtgtattcatagggatggtggctcaacaaatcaagcaaactggaatcaaggggagggggaagggaatgaaatggaaagggaggctgattcccttcccctgacttaccactaatttactaggctacctactytcatgagtaacctctcacagctacccagcacatgccacaatcctatgctcttgccttcttttatctgcactgtgtgaagggactcttttaaataaatgagcaagtgtcctaagctatgtcatccaaagattgtcctttccattctcaaatcctgtgactgggatcactcaacagcactgtgatgtattattttcaatgaggtgcctttcttaactgaccaaatgctgccttgtttggcccctaaatcaataaaatatgttaaaatttgtatcccctgttgtggcattttttttagataatctaagctagaaaaatgacattgaattctggacctggctggaaggaaaagaagccctttcttgtcrctggcagctgtgtggtagggaggtccaagtatgtgcatatgagataagcctgcaacctcttgaccttcagctcctatgcaggcttctcttgagcccagagacaaggcagcttggtctagtggagatagcactgtgcttggagttcaggggacctaggacaaatcccagccagttagttattcactgtgctcctgtttcctcagctgaaaaaggaagttggttatgccaccttcttggccttaatggcattaaatgaaatttataggaagaaggtttttgctcagtacctggcatgcaacagacattggataaatgttagttggatccagatatacacagaaagatatctgcttcctgccaggctggataactgttgaatggacacttgtccatagtctagaaagccagtgcttctaatccttaagccagatctttgactaccttttcagttgcttctttaacactctttgttgcttctctgtgtgtcctagtttaaattcatttcctctccagcaaaagtgagcttaaataatttctccaaactaaagctctcatgtttttggaagggctgcctttgcaagtgaggtttctgagaaatgactgttgttcccaaaacaagagggagctgggctggaagcaccactattcttctttaggcatcttgttacagagagaggcagggtcttcactgacatattaaatcctgttccctgaaccagcccctccctcttctgctccacttcctcacctgtgcagagtcattttcaggtgttagccttactgatttgcactgatctgtttgttccctgagctttttaaataccctgtgaaaattttctttcctcccttggtcatcatgcatctaattgtggggaaatgtttgtcaaaccaacctgcaaagcagcatggtgtagttgagaagaataaacagagaagactgggtgagctattgtttgtttgcttctttgggcctgggtttcctcatctaatctgcaaaccaagaatgcagactagtcctaccactcccggaagactgacgttgtgccaggtattatgcaaaggcttcatgtaaccctcgacttcacgtaaccctcacacagcaccctgtggagtcagaactgtccttcacttttataggtgaggaaaccagactcagagaggtgaagtggcattcctgaggtcatgcataagaggcagtcaggactgaaacacagtctctaacacttatccgtccccttgatcttgttgctgaagtgatttaattacttgcgtactctgcacacaggaagggctgctctgaataagagctcttttccatggacactcagcgctgccggaactgattttgaagaagtcactgccggctctgagggcctagggtatgtgtcttaggatctcctgtgtgcacaaagtgtcactgacagaacacagcaggatggagagcagcctcctcagaagcctcacaagtctttcctcagatgaagacagagcaacgagtcagaagacagatttcaacagcgacttcaccatgcgaccttggacaagttatctcacctcatcagtagaataggaatgatccctacccctcaaaggtgctgatgacactagtgaccaagatactcatgtgggttggactgcccaggacacagcagatgcttagtaaacacagatggaattcagagggaaaatgtaggcattgaagaaagttgtcttactgaccatccggaaccaggctaaggatcccctagaaatcatagacctctgaaattatatgcagaattctttatgtgttttcataattaataatagtctaacatattaaattcttagctgtgtgagaaaaaaaaaaaaaaaaaaaaaaaaaaaaaaaaaaaaaaaaa

SEQ ID NO: 307 - DNA, 1283 bp, Homo sapiens
  misc feature (16): n equals a,t,g, or c
  misc feature (46): n equals a,t,g, or c
  misc feature (1180): n equals a,t,g, or c
  misc feature (1219): n equals a,t,g, or c
  misc feature (1237): n equals a,t,g, or c
  misc feature (1243): n equals a,t,g, or c
  misc feature (1267): n equals a,t,g, or c
cacctcactaagggancaaagctggagctccaccgcggtggcggcngctctagaactagtggatcccccgggctgcaggaattcggcacgaggccgcggctgcggaacgggcggaggctgccggtttcgtaaccgtcgctcctcctcgctgactcgcgggctgtgaggcctgggtcggctcgggccgcaccgcgcggggccgctcggagtggaggccgcctgggggcaggcgggctagaggagcaggtacatgtgaagattttttggcagcttagcgtggaaaccattgatcaccctgctctcatttctacctgttctgtgttggcaagggagagtgcccaaatgagcaagatatcgcagcaaaacagcactccaggggtgaacggaattagtgttatccatacccaggcacatgccagcggcttacagcaggttcctcagctggtgcctgctggccctgggggaggaggcaaagctgtggctcccagcaagcagagcaaaaagagttcgcccatggatcgaaacagtgacgagtatcgcaacgccggagaggaacaacatggctgtgaaaaagagccggttgaaaagcaagcagaaagcacaagacacactgcagagagtcaatcagctcaaagaagagaatgaacggttggaagcaaaaatcaaattgctgaccaaggaattaagtgtactcaaagatttgtttcttgagcatgcacacaaccttgcagacaacgtacagtccattagcactgaaaatacgacagcagatggcgacaatgcaggacagtagacctcaccctttccagactttagagcttgtggcttgaatgttaaaggtgtgaccaccgacaccactcatgtcaatggctgaaagttgtccatttccatgactcaaagacccattggaggctattttctgggatcagcactgaagagttgattagctaaaaatgttagccttgtaattcgaatatctggttttaaatgatagaggtttttgtgggaatcaaaatcccccaaatgttaaggtatatggtaaaaaaagaaatatctgggatcccgatgttcttaataaatcctgacttcccaaraaakgcttcttttttaagttgacaaaaggaatggggaactggcaggccgcgcagaaggttcttggttttaatggataggctgaatnggattaagaaaagttgaatgccacctatggtaatctatntgtgatttcttctaaatnatggantataaattcgtagagctatagaanaaaaaaaaaaaaaaaa

SEQ ID NO: 308 - DNA, 4253 bp, Homo sapiens
ccgctgaaacccaccttgattcgtcccctctcccccctccccaccttccctcgccctaatcccccaacgaggaaggaaggagcagttggttcaatctctggtaatctatgccagcaattatgacaatgttagcagaccatgcagctcgtcagctgcttgatttcagccaaaaactggatatcmacttattagataatgtggtgaattgcttataccatggagaaggagcccagcaaagaatggctcaagaagtactgacacatttaaaggagcatcctgatgcttggacaagagtcgacacaattttggaattttctcagaatatgaatacgaaatactatggactacaaattttggaaaatgtgataaaaacaaggtggaagattcttccaaggaaccagtgcgaaggaataaaaaaatacgttgttggcctcattatcaagacgtcatctgacccaacttgtgtagagaaagaaaaggtgtatatcggaaaattaaatatgatccttgttcagatactgaaacaagaatggcccaaacattggccaacttttatcagtgatattgttggagcaagtaggaccagccgaaagtctctgtcaaaataatatggtgattcttaaactcttgagtgaagaagtatttgatttctctagtggacagataacccsaagtcmaatctaagcatttaaaagacagcatgtgcaatgaattctcacagatatttcaactgtgtcagtttgtaatggaaaattctcaaaatgctccacttgtacatgcaaccttggaaacattgctcagatttctgaactggattcccctgggatatatttttgagaccaaattaatcagcacattgatttataagttcctgaatgttccaatgtttcgaaatgtctctctgaagtgcctcactgagattgctggtgtgagtgtaagccaatatgaagaacaatttgtaacactatttactctgacaatgatgcaactaaagcagatgcttcctttaaataccaatattcgacttgcgtactcaaatggaaaagatgatgaacagaacttcattcaaaatctcagtttgtttctctgcacctttcttaaggaacatgatcaacttatagaaaaaagattaaatctcagggaaactcttatggaggcccttcattatatgttgttggtatctgaagtagaagaaactgaaatctttaaaatttgtcttgaatactggaatcatttggctgctgaactctatagagagagtccattctctacatctgcctctccgttgctttctggaagtcaacattttgatgttcctcccaggagacagctatatttgcccatgttattcaaggtccgtttattaatggttagtcgaatggctaaaccagaggaagtattggttgtagagaatgatcaaggagaagttgtgagagaattcatgaaggatacagattccataaatttgtataagaatatgagggaaacattggtttatcttactcatctggattatgtagatacagaaagaataatgacagagaagcttcacaatcaagtgaatggtacagagtggtcatggraaaatttgaatacattgtgttgggcaataggctccattagtggagcaatgcatgaagaggacgaaaaacgatttcttgttactgttataaaggatctattaggattatgtgaacagaaaagaggcaaagataataaagctattattgcatcaaatatcatgtacatagtaggtcaatacccacgttttttgagagctcactggaaatttctgaagactgtagttaacaagctgttcgaattcatgcatgagacccatgatggagtccaggatatggcttgtgatactttcattaaaatagcccaaaaatgccgcaggcatttcgttcaggttcaggttggagaagtgatgccatttattgatgaaattttgaacaacattaacactattatttgtgatcttcagcctcaacaggttcatacgttttatgaagctgtggggtacatgattggtgcacaaacagatcaaacagtacaagaacacttgatagaaaagtacatgttactccctaatcaagtgtgggatagtataatccagcaggcaaccaaaaatgtggatatactgaaagatcctgaaacagtcaagcagcttggtagcattttgaaaacaaatgtgagagcctgcaaagctgttggacacccctttgtaattcagcttggaagaatttatttagatatgcttaatgtatacaagtgcctcagtgaaaatatttctgcagctatccaagctaatggtgaaatggttacaaagcaaccattgattagaagtatgcgaactgtaaaaagggaaactttaaagttaatatctggttgggtgagccgatccaatgatccacagatggtcgctgaaaattttgttccccctctgttggatgcagttctcattgattatcagagaaatgtcccagctgctagagaaccagaagtgcttagtactatggccataattgtcaacaagttagggggacatataacagctgaaatacctcaaatatttgatgctgtttttgaatgcacattgaatatgataaataaggactttgaagaatatcctgaacatagaacgaactttttcttactacttcaggctgtcaattctcattgtttcccagcattccttgctattccacctacacagtttaaacttgttttggattccatcatttgggctttcaaacatactatgaggaatgtcgcagatacgggcttacagatactttttacactcttacaaaatgttgcacaagaagaagctgcagctcagagtttttatcaaacttatttttgtgatattctccagcatatcttttctgttgtgacagacacttcacatactgctggtttaacaatgcatgcatcaattcttgcatatatgtttaatttggttgaagaaggaaaaataagtacatcattaaatcctggaaatccagttaacaaccaaatctttcttcaggaatatgtggctaatctccttaagtcggccttccctcacctacaagatgctcaagtaaagctctttgtgacagggcttttcagcttaaatcaagatattcctgctttcaaggaacatttaagagatttcctagttcaaataaaggaatttgcaggtgaagacacttctgatttgtttttggaagagagagaaatagccctacggcaggctgatgaagagaaacataaacgtcaaatgtctgtccctggcatctttaatccacatgagattccagaagaaatgtgtgattaaaatccaaattcatgctgttttttttctctgcaactcgttagcagaggaaaacagcatgtgggtatttgtcgaccaaaatgatgccaatttgtaaattaaaatgtcacctagtggccctttttcttatgtgtttttttgtataagaaattttctgtgaaatatccttccattgtttaagcttttgttttggtcatctttatttagtttgcatgaagttgaaaattaaggcatttttaaaaattttacttcatgcccatttttgtggctgggctggggggaggaggcaaattcgatttgaacatatacttgtaattctaatgcaaaattatacaatttttcctgtaaacaataccaatttttaattagggagcattttccttctagtctatttcagcctagaagaaaagataatgagtaaaacaaattgcgttgtttaaaggattatagtgctgcattgtctgaagttagcacctcttggactgaatcgtttgtctagactacatgtattacaaagtctctttggcaagattgcagcaagatcatgtgcatatcatcccattgtaaagcgacttcaaaaatatgggaacacagttagttatttttacacagttctttttgtttttgtgtgtgtgtgctgtcgcttgtcgacaacagctttttgttttcctcaatgaggagtgttgctcatttgtgagccttcattaactcgaagtgaaatggttaaaaatatttatcctgttagaataggctgcatctttttaacaactcattaaaaaacaaaacaactctggcttttgagatgacttatactaatttacattgtttaccaagctgtagtgctttaagaacactacttaaaaagcaaaataaacttggtttacatttaaaaaaaaaaaaaaaaaaaaaaaaaaaaaaaaagggcggccgc

SEQ ID NO: 309 - DNA, 2183 bp, Homo sapiens
  misc feature (794): n equals a,t,g, or c
  misc feature (1091): n equals a,t,g, or c
ccgtcacttttggtgtcatcaccagcatcatcatttgggccctggccatcttggcttccatgccaggcttatacttttccaagacccaatgggaattcactcaccacacctgcagccttcactttcctcacgaaagcctacgagagtggaagctgtttcaggctctgaaactgaacctctttgggctggtattgcctttgttggtcatgatcatctgctacacagggattataaagattctgctaagacgaccaaatgagaagaaatccaaagctgtccgtttgatttttgtcatcatgatcatcttttttctcttttggaccccctacaatttgactatacttatttctgttttccaagacttcctgttcacccatgagtgtgagcagagcagacatttggacctggctgtgcaagtgacggaggtgatcgcctacacgcactgctgtgtcaacccagtgatctacgccttcgttggtgagaggttccggaagtacctgcggcagttgttccacaggcgtgtggctgtgcacctggttaaatggctccccttcctctccgtggacaggctggagagggtcagctccacatctccctccacaggggagcatgaactctctgctgggttctgactcagaccataggaggccaacccaaaataagcaggcgtgacctgccaggcacactgagccagcagcctggctctkcccagccaggttctgactcttggcacagcatggagtcacagccacttgggatagagagggaatgtaatggtggcctggggcttctgnaggcttctggggcttcagtcttttccatgaacttctcccctggtagaaagaagatgaatgagcaaaaccaaatattccagagactgggactaagtgtaccagagaagggcttggactcaagcaagatttcagatttgtgaccattagcatttgtcaacaaagtcacccacttcccactattgcttgcacaaaccaattaaacccagtagtggtgactgtgggctccattcaaagtgagctcctaagccatgggagacactgatgtatgaggaatttctgttcttccatcaccccccncccccgccaccctcccactgccaaagaacttggaaatagtgatttccacagtgactccactctgagtcccagagccaatcagtagccagcatctgcctccccttcactcccaccgcaggatttgggctcttggaatcctggggaacatagaactcatgacggaagagttgagacctaacgagaaatagaaatggggaactactgctggcagtggaactaagaaagcccttaggaagaatttttatatccactaaaatcaaacaattcagggagtgggctaagcacgggccatatgaataacatggtgtgcttcttaaaatagccataaaggggagggactcatcatttccatttacccttcttttctgactatttttcagaatctctcttcttttcaagttgggtgatatgttggtagattctaatggctttattgcagcgattaataacaggcaaaaggaagcagggttggtttcccttctttttgttcttcatctaagccttctggttttatgggtcagagttccgactgccatcttggacttgtcagcaaaaaaaaaaaataataataataataaggcctgctgtgtaagctgacagtatttgtagctgatagggggytgggaggaaagtgtctactaggagggtggggtgagattctgtgttgatgtagragsccgagaaggcccttaactcaaagtagcttatttatccaaaatgttctggatgcatcatctccaaccaaggaccccttatttatcatgcctttgttctcttttccctcagatgtatatttctttaaaaataattttcctaataacaaaacttatttctaaaacagcttaaaaattcaaagaaaaaccccaaacactgacattacctacacttccactacccaaagacaaaatgtgcccactgtgtgcttttgagtgtattttcttttagtttgttttttgttgggtgcatatttatgataataacaatgatggacttcaattgtactcactgttctattgttggttttaattagcagcaagttgtgatcactttcccaggtgaataaatcatttcaaagcataaaaaaaaaaaaaa

SEQ ID NO: 310 - DNA, 3092 bp, Homo sapiens
  misc feature (28): n equals a,t,g, or c
  misc feature (3086): n equals a,t,g, or c
  misc feature (3089): n equals a,t,g, or c
cttaatctcggaagcggcgccgcagggnattgaggggttgactgagcgttgcgagccttagctttctcccgaacgccagcgctgaggacacgatgtcgcggctctcccgctcactgctttgggccgccacctgcctgggcgtgctctgcgtgctgtccgcggacaagaacacgacccagcacccgaacgtgacgactttagcgcccatctccaacgtaacctcggcgccggtgacgtccctcccgctggtcaccactccggcaccagaaacctgtgaaggtcgaaacagctgcgtttcctgttttaatgttagcgttgttaatactacctgcttttggatagaatgtaaagatgagagctattgttcacataactcaacagttagtgattgtcaagtggggaacacgacagacttctgttccgtttccacggccactccagtgccaacagccaattctacagctaaacccacagttcagccctccccttctacaacttccaagacagttactacatcaggtacaacaaataacactgtgactccaacctcacaacctgtgcgaaagtctacctttgatgcagccagtttcattggaggaattgtcctggtcttgggtgtgcaggctgtaattttctttctttataaattctgcaaatctaaagaacgaaattaccacactctgtaaacagacccattgaattaataaggactggtgattcatttgtgtaactcactgaagccaaaatactatcttttaagatgtcccacatggaagacgctattccaggatctttaaatttccatggatgcatataggatgtttgggagcatcatccgtgaagaaaaaatcaattaaatcattgtgttcaacaggaatatttaaaatattctgcatgaatcctgtggctgtcttattttaaatagctgctgctgtgggattatattttttttccttaacatgccaaatataactttctgaaagtgatggaaaatgttgtcttgtgcagacaacatcatggctcttggcagtttaaatttagtaattttaatttagtgaacagaattgagaagaacgtgccaaatgagaatcaattaggtggatttttggctgtcatttcaaaagtggaataaatttattaatttagtagtactaaatggtatccttagattaaaattttgtgcttgataacagctgttttttctacattagaaataagatgccacacaaggaactacattccagatttaaagaaatgaaaggataccattagtgtgtataacagattattgttcatacttgtaaagcaycttatgtcattgagaatataaagaacagtgccttagaagacagtgaaaggtaagctctagcttaatgtctatgatttgttctttgacattaaggaaggtaaggattggtcagaggatgtaacttgatgtgagcagtagtaaacctgttttagatatcatactgttaatattttattgaaaatttatttcagagcggagaaacttaagctaaagtctgttatacagaattgaaagccttcgtatcttgaacctcccaacatttttcttatggctgttgaaaagtatagagctaaattgatttaattacactttcctttgtactttaaaaaaaagtatgctagcactattgtaccttgaaaggatttccaccagactgtcttgagtagtgacttctttggtgaggcaagaaggatatacattattttagaatcatttactatttaaatgagacaatcatattattttagaatcatttattttaaatgagacaatcattttaagttttaagataacagaagtgaccaatgtaatttcacaacacctaaggattttttggttgatcaggttactgtagatttttactgattgtcctggatgaatagactgtgctttttctttttctctcccttccttcttggtttcccatagtataataagcatgcatactttaacttctatagttttctcctttagagggtcktcttcagttttagaggtttacttctcccttgcctttgactcattggactagtgcagaggctttaagtagtttaaaatgggcttttgcttttctaggtcattaacgttttttatttagtttctttagccaatagtggctgagtttcgcacttgattttcaatattttatagtaagaaatgacaaactgctttgkttcatttcataaacaaactctgcatttagataactattaaaggttgttaagatgaagatttactgtttctttgttactcgttggtacagctgtttgttttacttgcacatttgtacatatacttaatgttttcaagtgccttaattgtttaaaatctctggcttcaaagtttcttggggaaaggtcggtttacctcacattttttgtttccattagtaatattctaggtacctcacaaaatgtattatggtgccatggctgttagtttttagtgagtgctgtaggattaattcgaaaataggcagaattccattcctcccaaggtggcaaaaattagctatactgatgtaattgtcatttacctgggtatgaattccctgacacacattcatgtcaacatatgtagcaaattttgtgaaaacataacaatttgaagcttctgtaattttgagcactgctctaacaacaagcataatataaaattagttagattttgcaagtctacaaatgagctcttgcaacagaactcacagcctttttacttttttcccctaactttagcaatgtagtatcttgagccattaatttttgggtttttttaaaatccagaaggtatatagaaaccttttcagatttttcatctgatttgttcttgcagatgttcttctatcaaataccttattttaccttacagatatttgttgcacaggcagatactgctgtatttagacatttctatttcagttcattaaaaactgcaaaaccaatctgtatcatgtaccaaactgacttaaaataaatctacatgtttattgaattaaaaaaaaaaaaaaaaaaaaaaaaaaaaaaaaaaaaaaaaaaaaaaaaaaaaaaaaaaaaaaaanggnagg

SEQ ID NO: 311 - DNA, 1296 bp, Homo sapiens
  misc feature (695): n equals a,t,g, or c
gcccccgcccgcgcgagccccaggtcctggcagcaggtgatgtgcggtcgccatcagacccgcgaagggtcaaggccaacctgtcagaggtgcttgtgtacagtgtcctgggggtcaacgtgaccagcactgaagtctatggggccttcacctgctccatccagaacatcagcttctcctccttcactcttcagagagctggccctacaagccacgtggctgcggtgctggcctccctcctggtcctgctggccctgctgctggccgccctgctctatgtcaagtgccgtctcaacgtgctgctctggtaccaggacgcgtatggggaggtggagataaacgacgggaagctctacgacgcctacgtctcctacagcgactgccccgaggaccgcaagttcgtgaacttcatcctaaagccgcagctggagcggcgtcggggctacaagctcttcctggacgaccgcgacctcctgccgcgcgctgagccctccgccgacctcttggtgaacctgagccgctgccgacgcctcatcgtggtgctttcggacgccttcctgagccgggcctggtgcagccacagcttccgggagggcctgtgccggctgctggagctcacccgcagacccatcttcatcaccttcgagggccagaggcgcgaccccgcgcacccggcgctccgcctgctgcgccancaccgccacctggtgaccttgctgctctggaggcccggctccgtgactccttcctccgatttttggaaagaagtgcagctggcgctgccgcggaaggtgcggtacaggccggtggaaggagacccccagacgcagctgcaggacgacaaggaccccatgctgattcttcgaggccgagtccctgagggccgggccctggactcagaggtggacccggaccctgagggcgacctgggtgtccgggggcctgtytttggagagccatcagctccaccgcacaccagtggggtctcgctgggagagagccggagcagcgaagtggacgtctcggatctcggctcgcgaaactacagtgcccgcacagacttctactgcctggtgtccaaggatgatatgtagctcccaccccagagtgcaggatcatagggacagcgggggccagggcagcggcgtcgctcctctgctcaacaggaccacaacccctgccagcagccctgggaccctgccagcagccctgggaaaaggctgtggcctcagggcgcctcccagtgccagaaaataaagtccttttggattctgaaaaaaaaaaaaaaaaaaaaaa

SEQ ID NO: 312 - DNA, 1348 bp, Homo sapiens
  misc feature (1251): n equals a,t,g, or c
  misc feature (1306): n equals a,t,g, or c
  misc feature (1313): n equals a,t,g, or c
  misc feature (1316): n equals a,t,g, or c
ggcctgttcaacccacccatgccccaggaacaacggcagctgcccacaataccacccgcacagctgcacctgcctccacggttcctgggcccacccttgcacctcagccatcgtcagtcaagactggaatttatcaggttctaaacggaagcagactctgtataaaagcagagatggggatacagctgattgttcaagacaaggagtcggttttttcacctcggagatacttcaacatcgaccccaacgcaacgcaagcctctgggaactgtggcacccgaaaatccaaccttctgttgaattttcagggcggatttgtgaatctcacatttaccaaggatgaagaatcatattatatcagtgaagtgggagcctatttgaccgtctcagatccagagacagtttaccaaggaatcaaacatgcggtggtgatgttccagacagcagtcgggcattccttcaagtgcgtgagtgaacagagcctccagttgtcagcccacctgcaggtgaaaacaaccgatgtccaacttcaagcctttgattttgaagatgaccactttggaaatgtggatgagtgctcgtctgactacacaattgtgcttcctgtgattggggccatcgtggttggtctctgccttatgggtatgggtgtctataaaatccgcctaaggtgtcaatcatctggataccagagaatctaattgttgcccggggggaatgaaaataatggaatttagagaactctttcatcccttccaggatggatgttgggaaattccctcagagtgtgggtccttcaaacaatgtaaaccaccatcttctattcaaatgaagtgagtcatgtgtgatttaagttcaggcagcacatcaatttctaaatactttttgtttattttatgaaagatatagtgagctgtttattttctagtttcctttagaatattttagccactcaaagtcaacatttgagatatgttgaattaacataatatatgtaaagtagaataagccttcaaattataaaccaagggtcaattgtaactaatactactgtgtgtgcattgaagattttattttacccttgatcttaacaaagcctttgctttttatcaaatggactttcagtgcttttactatctgtgttttatggtttcatgtaacatacatattcctggtgtagcacttaactccttttccactttaaaattggtttttggttttttggagacgggagtttcacctccttgtcancccaaggctgggaagtaccagtgggcaccgatcctcgggccttaagggcaacctncggcctnccngggttccaagtggaatctcccggcttcagctt

SEQ ID NO: 313 - DNA, 413 bp, Homo sapiens
  misc feature (399): n equals a,t,g, or c
acaagctgttgccagtggtcatcatcgcagtgggtgtcttcctcttcctggtggcttttgtgggctgctgcggggcctgcaaggagaactattgtcttatgatcacgtttgccatctttctgtctcttatcatgttggtggaggtggccgcagccattgctggctatgtgtttagagataaggtgatgtcagagtttaataacaacttccggcagcagatggagaattacccgaaaaacaaccacactgcttcgatcctggacaggatgcaggcagattttaagtgctgtggggctgctaactacacagattgggagaaaatcccttccatgtcgaagaaccgagtccccgactcctgctgcattaatgttactgtgggcttgggttaattcaacgaanaaagcgatccataa

SEQ ID NO: 314 - DNA, 1743 bp, Homo sapiens
  misc feature (1731): n equals a,t,g, or c
  misc feature (1738): n equals a,t,g, or c
taatcaaagctcaggaggagagctgcattccactgtttcacagatgctgtgagggtgacaaagatgcagggcacccactggaaacacagacggcactctgcgaaagaggaaggggcgccaggagcttgggtgagcaaggttggaggtgattctgcccctctccccaggctttctgtattagaaaactgaagcttcaagaacagacttgcctaacaacaggaaacttgtatgtctcgaagtggcaattcacacataaggctccatgactcctgaactctcacaaatattagttggctcttttcatggttttactgaagttgctagaagtttacagaaaaggaagtgcaggaacatttcacaaatctacaatctgtgagtatcacatcctgtatagctgtaaacactggaataaggaagggctgatgactttcagaagatgaaggtaagtagaaaccgttgatgggactgagaaaccagagttaaaacctctttggagcttctgaggactcagctggaaccaacgggcacagttggcaacaccatcatgacatcacaacctgttcccaatgagaccatcatagtgctcccatcaaatgtcatcaacttctcccaagcagagaaacccgaacccaccaaccaggggcaggatagcctgaagaaacatctacacgcagaaatcaaagttattgggactatccagatcttgtgtggcatgatggtattgagcttggggatcattttggcatctgcttccttctctccaaattttacccaagtgacttctacactgttgaactctgcttacccattcataggaccctttttttttatcatctctggctctctatcaatcgccacagagaaaaggttraccaagcttttggtgcatagcagcctggttggaagcattctgagtgctctgtctgccctggtgggtttcattatcctgtctgtcaaacaggccaccttaaatcctgcctcactgcagtgtgagttggacaaaaataatataccaacaagaagttatgtttcttacttttatcatgattcactttataccacggactgctatacagccaaagccagtctggctggawctctctctctgatgctgatttgcactctgctggaattctgcctagctgtgctcactgctgtgctgcggtggaaacaggcttactctgacttccctggggagaaagattttagaattattggcctttcccaatttctgcacagttgactctactgmcaccttatggtgatamcgaggamcamcttttctcccaagagaaatagaaaaaggcaaaacaaggtatctggaattcactggaggtatctaacttgaccacaggaaatcacacttgctacctttgtcctttacagtgtctccacatgtcatcagtgaggggaaactatgcatttttcaaaagttatttattattgtaagraaagtggctgtgcttcagtcaggagtaggccaaggtaaacatccggtatggtacgacacagcgggtttggagcgcaggtgcacaaccccatgcattatgtaaccatgtactataatctgtttgtgtgagctcatacctggctttgagccactctgtctgtgagtaatataacygcactgctgactctgtaggacaggagagagaataaagccacgttccaactgcctaaaaaaaaaaaaaaaaaactcgagggggggcccggaacccaattcggagtgtntcccgtncatta

SEQ ID NO: 315 - DNA, 2044 bp, Homo sapiens
cccgggtcgacccacgcgtccggaaagatccaaaacaagtggctgcggccgtcgcccaggagtcatcggacgccagaatctggccgggttctgagcttgttccgcctccctcccccgggaatggcgctatccgggtcgaccccggccccgtgctgggaggaggatgagtgcctggactactacgggatgctgtcgcttcaccgtatgttcgaggtggtgggcgggcaactgaccgagtgcgagctggagctcctggcctttctgctggatgaggctcctggcgccgccggaggcttagcccgggcccgcagcggcctagagctcctgctggagctggagcgccgcgggcagtgcgacgagagcaacctgcggctgctggggcaactcctgcgcgtgctggcccgccacgacctgctgccgcacctggcgcgcaagcggcgccggccagtgtctccagaacgctatagctatggcacctccagctcttcaaagaggacagagggtagctgccgtcgccgtcggcagtcaagcagttctgcaaattctcagcagggtcagtgggagacaggctcccccccaaccaagcggcagcggcggagtcggggccggcccagtggtggtgccagacggcggcggagaggggccccagccgcaccccagcagcagtcagagcccgccagaccttcctctgaaggcaaagtgacctgtgacatccggctccgggttcgagcagagtactgcgagcatgggccagccttggagcagggcgtggcatcccggcggccccaggcgctggcgcggcagctggacgtgtttgggcaggccaccgcagtgctgcgctcaagggacctgggctctgtggtttgtgacatcaagttctcagagctctcctatctggacgccttctggggcgactacctgagtggcgccctgctgcagccctgcggggcgtgttcctgactgaggccctgcgagaggctgtgggccgggaggctgttcgcctgctggtcagtgtggatgaggctgactatgaggctggccggcgccgcctgttgctgatggaggaggaaggggggcggcgcccgacagaggcctcctgatccaggactggcaggattgatcccacctccaagtctccgggccaccttctcctgggaggacgaccatctctacccctagaggactgtcactctagcatctttgaggactgcgacaggaccgggacagcaggccccttgacagcccctcccacaggatgtgggctctgaggcctaaaccatttccagctgagtttccttcccagactcctcctacccccaggtgtgcccccttagcctccggaggcgggggctgggcctgtatctcagaagggaggggcacagctacacactcaccaaaggcccccctgcacattgtatctctgatcttgggctgtctgcactgtcacaggtgcacacactcgctcatgctcacactgcccctgctgagatcttccctgggcctctgccctggcctgcttcccagcacacacttctttggcctaagggcttctctctcaggacctctaatttgaccacaaccaacctgggcttcagccacatcagtgggcactggagctggggtgcacatggggcctgctcaccttgcccacacatctccagccagccagggccctgcccagcttcaatttacagacctgactctcctcaccttcccccctgctgtccagagctgaacatagacttgcacttggatgtcacctggagtgtcacatgggagtgttatggcagcatcataccaaggcctactgttgcacatggggccaaaaccagtaaacagccaccttcttggaaagggaatgcaaaggctttgggggtgatggaaaagacctttaacaaatgataccaattaaactgccctggaaagggcataggtgggaaaaaaaaaaaaaaaaaaaaaaaaaaaaaaaaaaaaaaaaaaaaaaaaaaaaaaaaaaaaaaaaaaaaaaaaaaaaaaaaaaaaaaaaaaaaaaaaaaaaaaaaaa

SEQ ID NO: 316 - DNA, 1750 bp, Homo sapiens
  misc feature (784): n equals a,t,g, or c
  misc feature (1491): n equals a,t,g, or c
  misc feature (1671): n equals a,t,g, or c
  misc feature (1704): n equals a,t,g, or c
  misc feature (1732): n equals a,t,g, or c
  misc feature (1734): n equals a,t,g, or c
  misc feature (1746): n equals a,t,g, or c
tagatcgcgagcggccgctcagatctagaaccgccgggtgagtgagagagttggttggtgttgggccggaggaaagcgggaagactcatcggagcgtgtggatttgagccgccgcattttttaaccctagatctcgaaatgcatcgtgattcctgtccattggactgtaaggtttatgtaggcaatcttggaaacaatggcaacaagacggaattggaacgggcttttggctactatggaccactccgaagtgtgtgggttgctagaaacccacccggctttgcttttgttgaatttgaagatccccgagatgcagctgatgcagtccgagagctagatggaagaacactatgtggctgccgtgtaagagtggaactgtcgaatggtgaaaaaagaagtagaaatcgtggcccacctccctcttggggtcgtcgccctcgagatgattatcgtaggaggagtcctccacctcgtcgcagagtcwccatcatgtctcttctcaccaccctctgaatctgcattagccagtcaactagccctttcagcgtcatgtgaccagcgcgccccattcagcttggctggtgtcgtttcacatgacccaggctggccagtcgtcaggttgcaccgccctttggttcccgagcatgctgttttctctcagccttctctccaaccttaaccaaatcggcagcagccacctcgaccgcccacacattcctggccaatcagctcagctgtttatttaccaaatgtcttcacaacaactacagcagcagccttcggntaacaaaaaagcaggaaaaatccacaacacccccttcgccaaccaactaaatccaacgcaacatctggcaaaaccttttcagcaaattcttcctggccgtcagtccggcagcctcacctcaccatttctagcttgttgaaacccaaaactaatctccaagaaggagaagcttctctcgcagccggagcaggtccctttctagagataggagaagagagagatcgctgtctcgggagagaaatcacaagccgtcccgatccttctctaggtctcgtagtcgatctaggtcaaatgaaaggaaatagaagacagtttgcaagagaagtggtgtacaggaaattacttcatttgacaggagtatgtacagaaaattcaagttttgtttgagacttcataagcttggtgcatttttaagatgttttagctgttcaaatctgtttgtctcttgaaacagtgacacaaaggtgtaattctctatggtttgaaatggatcatacgaggcatgtaataccaagaattgttactttacaatgttcccttaagcaaaattgaatttgctttgaacttttagttatgcacagactgataataaacctctaaacctgcccagcggaagtgtgtttttttttaaatttaaataccrgaaacmactgggcaaaaattgaacctaagatttacttttttttccatagcctgggatataggcngcagctatagttgamcaagcagtcyttaaaaactgctgtgaaacacaggccatcagggaaaacgaaatgctgcactattaaattagrggttttkgaaaaatccaactctcatcctgggcagaggttgcctagttgggatagaatgttaagtttccaagaaagtttacctttgctttaggncataaggtccctaattgattgccggtaaatggnaacaaggccggtccgggccatccttaangngccaaatttggngatt

SEQ ID NO: 317 - DNA, 2383 bp, Homo sapiens
gctcaagaaaggggcagcggaggaggcagagttggaagattctgatgacgaagagaaacctgttaagcaggacgactttcctaaggattttggaccaaggaagctaaaaacgggtggcaattttaagcccagccagaaaggttttgcaggaggaaccaaatctttcatggacttcggcagctgggaaagacacacaaaaggaattggacagaagcttcttcagaagatgggctacgtccctggacggggcctcgggaagaatgcacaaggtatcattaacccaattgaagccaagcagagaaagggaaaaggtgctgtgggggcttatggatccgagcgcaccactcagtccatgcaagacttccctgtggttgactcagaggaagaagctgaagaggagtttcagaaggagctgagccagtggaggaaagacccaagtggaagcaagaagaagcccaaatactcttacaagaccgtggaagagttgaaggccaagggcaggattagcaagaagctcactgctccccagaaggaactttctcaagtcaaggtcatagacatgacaggccgggagcagaaggtctactacagctacagtcagatcagccacaagcacaacgttcccgatgatgggctgccgctacagtcccaacagctgccacagtctggcaaagaggccaaggcccccggcttcgcgctgcccgagctggagcacaacctgcagctgctcatcgacctcacggagcaggagatcatccagaatgaccggcagctacagtatgagcgggacatggtggtcaacctcttccatgagctggagaagatgaccgaggtcctggaccacgaggagcgggtcatctcgaacctcagcaaggtcctggagatggtggaggagtgcgagcggcggatgcagcccgactgcagcaaccccctcaccctggacgagtgtgcccgcatcttcgaaaccctgcaggacaagtactatgaggagtacaggatgtccgaccgtgtggaccttgctgtggccatcgtctatccactcatgaaggagtacttcaaggagtgggatcccctcaaagactgcacttatggcaccgagatcatctctaagtggaaaagcctcctagagaatgaccagctcttgtcccatggcggacaggacctctcagcagatgcctttcacaggttgatatgggaagtctggatgccttttgttcgaaatattgtcacccagtggcagccaaggaactgtgacccgatggtggactttttggatagttgggtgcacattattcctgtgtggatcttagataacatactggaccaactcatcttccccaagctgcaaaaggaggtggaaaactggaacccgctcacagacactgttcccatccactcttggatccacccatggctgccccttatgcaggcacggctggagccactctattcccccatccgtagtaagctgtccagcgccctgcagaagtggcaccccagcgactcctctgccaagctcatcctccagccctggaaggatgtcttcactcctggctcctgggaagcattcatggtcaaaaacatagtgcccaagctggggatgtgtcttggtgagctagtcattaacccccaccagcagcacatggatgcattctattgggtgattgactgggaagggatgatctctgtctctagcctggtgggacttcttgaaaagcacttcttccccaagtggcttcaggtgctgtgctcttggctcagtaacagcccaaattatgaggagatcaccaagtggtacctgggttggaagtcgatgttctcagaccaagtgctggcacatccatctgtcaaggacaaatttaatgaggcacttgatatcatgaaccgggcggtgtcctccaacgttggtgcctacatgcagccaggagcacgggagaacattgcctatctcacccacacggagcggaggaaggacttccagtacgaggccatgcaggagaggcgggaggctgagaacatggctcagaggggcattggcgtggccgctagctctgtgcccatgaactttaaggacctcattgagaccaaggctgaggagcacaacattgtcttcatgcccgtcattgggaagcgacacgaagggaagcagctctacacctttggccgcattgtgatctacatcgaccggggagtggtctttgtccagggcgagaagacgtgggtgcccacctcactgcagagcctgatcgacatggccaagtgaactgtggcaggtccagaaccagtcagagacttgcccctaagagggatgtactgtaaataaacagtatttttagatcaccttcaaaaaaaaaaaaaaaaaaaaaaaaaaaaaaaaaaaaaa

SEQ ID NO: 318 - DNA, 1061 bp, Homo sapiens
  misc feature (81): n equals a,t,g, or c
  misc feature (123): n equals a,t,g, or c
aattcggcacgagattttatgtgtctttgaagtcttgaaaacaattttccaaataatcagtaattgttttattctattttnctgtcttgctaaaataggtagcaaaagatatggcagcggcancagttagatgcatcagaaaggagatccgggatttgtatgttaacatccagcctgttcaagaacctaaagaccaagcatttggcaatggaaatggaataataattattgctgagacctccactggctgtttgtttgctggatcatcgcttggtaaacgaggtgtaaatgcagacaaagttggaattgaagctgccgaaatgctattagcaaatcttagacatggtggtactgtggatgagtatctgcaagaccagctgattgttttcatggcattagccaatggagtttccagaataaaaacaggaccagttacactccatacgcaaaccgcgatacattttgctgaacaaatagcaaaggctaaatttattgtgaagaaatcagaagatgaagaagacgccgctaaagatacttatattattgaatgccaaggaattgggatgacaaatccaaatctatagagtatttgcctcttaaatgatacctcattgatatattgcactatttcataaatactataaaataatgactaggaagtaacttattaaaggctatgacttaaatttgaagatgaagtacagtgttctaggtttgctgagaaggcttcattaaattaatctcactttgaatatctcctgagagatggacaatgaaatatcagttggtggatatgtgtgatagctgatttcaatattgaagtattgaaataaaatattctttacacctgaarwaaatacatttttcttttttatgtaattaattaaatcagggatatagatttgatctgtaatttgggtataattctaatctttgctgaaatcacatctcaagtataatgaggcaactttatgcaaatgtcttgttgtgacacatacattccctttttttttttttgaacagctgtcttcccagctggggcgtgggtgactggtccgcac

SEQ ID NO: 319 - DNA, 2372 bp, Homo sapiens
  misc feature (81): n equals a,t,g, or c
  misc feature (1048): n equals a,t,g, or c
  misc feature (1289): n equals a,t,g, or c
gcatggaggaggcggaggccgcggcgagccgggccgagcatgagggccctagcggggcccgarcrgggcccggggcccctnaagccattcctgaagtcatgggctggccaggacattggtgacccgccaatccggtatggacgactggaagcccagccccctcatcaagccctttggggctcggaagaagcggactggrtaccttacctggaagtataaactgacaaaccagcgggccctgcggagattctgtcagacaggggccgtgcttttcctgctggtgactgtcattgtcaatatcaagttgatcctggacactcggcgagccatcagtgaagccaatgaagacccagagccagagcaagactatgatgaggccctaggccgcctggagcccccacggcgcagaggcagtggtccccggcgggtcctggacgtagaggtgtattcaagtcgcagcaaagtatatgtggcagtggatggcaccacggtgctggaggatgaggcccgggagcagggccggggcatccatgtcattgtcctcaaccwggccacgggccacgtgatggcaaaacgtgtgtttgacacgtactcacctcatgaggatgaggccatggtgctattcctcaacatggtagcgcccggccgartgctcatctgcactgtcaaggatgarggctccttccacctcaaggacacagccaaggctctgctgaggagcctgggcagccagctggccctgccctgggctggagggacacatgggccttcgtgggacgaaaaggaggtcctgtcttcggggagaaacattctaaatcacctgccctctcttcctggggggacccagtcctgctgaagacagatgtgccattgagctcagcagaagaggcagagtgccactgggcagacacagagctgaaccgtcgccgccggckttctgcagcaaagttgagggctatggaagtgtatgcagctgcaaggaccccacacccatcgagttcagccctgacccactcccagacaacaaggtcctcaatgtgcctgtggntgtcattgcagggaaccgacccaattacctgtacaggatgctgcgctctctgctttcagcccagggggtgtctcctcagatgataacagttttcattgacggctactatgaggaacccatggatgtggtggcactgtttggtctgaggggcatccagcatactcccatcagcatcaagaatgcccgcgtgtctcagcactacaaggccagcctcactgccactttcaacctgtttccggangccaagtttgctgtggttctggaagaggacctggacattgctgtggattttttcagtttcctgagccaatccatccacctactggaggaggatgacagcctgtactgcatctctgcctggaatgaccaggggtatgaacacacggctgaggacccagcactactgtaccgtgtggagaccatgcctgggctgggctgggtgctcaggaggtccttgtacaaggaggagcttgagcccaagtggcctacaccggaaaagctctgggattgggacatgtggatgcggatgcctgaacaacgccggggccgagagtgcatcatccctgacgtttcccgatcctaccactttggcatcgtcggcctcaacatgaatggctactttcacgaggcctacttcaagaagcacaagttcaacacggttccaggtgtccagctcaggaatgtggacagtctgaagaaagaagcttatgaagtggaagttcacaggctgctcagtgaggctgaggttctggaccacagcaagaacccttgtgaagactctttcctgccagacacagagggccacacctacgtggcctttattcgaatggagaaagatgatgacttcaccacctggacccagcttgccaagtgcctccatatctgggacctggatgtgcgtggcaaccatcggggcctgtggagattgtttcggaagaagaaccacttcctggtggtgggggtyccggsttccccctactcscctggctcagaatctaacctatttattgactgtcctgagggccttgaaaacaggccgaacctggagggcctggatttctttttgggctggaatgctgccctgagggtggggctggctcttactcaggaaactgctgtgcccaacccatggacargcccagctggggcccacatgctgacacagactcactcagagacccttagacactggaccaggcctcctctcagccttctctttgtccagatttccaaagctggataagttggtcattgattaaaaaaggagaagccctctggaaaaaaaaaaaaaaaaaaaaaaaaaaaaaaaaaaaaaaaaaaaaaa

SEQ ID NO: 320 - DNA, 438 bp, Homo sapiens
  misc feature (364): n equals a,t,g, or c
  misc feature (398): n equals a,t,g, or c
  misc feature (424): n equals a,t,g, or c
aattcggctttcgagcggccgcccgggcaggtattttaataatcaacaccctcctagccttactactaataattattacattttgactaccacaactcaacggctacatagaaaaatccaccccttacgagtgcggcttcgaccctatatcccccgcccgcgtccctttctccataaaattcttcttagtagctattaccttcttattatttgatctagaaattgccctccttttacccctaccatgagccctacaaacaactaacctgccactaatagttatgtcatccctcttattaatcatcatcctagccctaagtctggcctatgagtgactacaaaaaggattagactgaaccgaatnaaaaaaaaaaaaaaaaaaactcgrgggggggccnggtacccatycsccctaaagggaagnggattacaattcac

SEQ ID NO: 321 - DNA, 2895 bp, Homo sapiens
  misc feature (1255): n equals a,t,g, or c
cccacgcgtccgcccacgcgtccgcccacgcgtccggtaggaggaagaaggagaggaaggagaagagacggcagaggaagggggaagagtgcagcctgcctggcctcacttgcttcacgcatgacaacaaccactggcagacagccccgttctggaacctgggatctttctgtgcttgcacgagttctaacaataacacctactggtgtttgcgtacagttaatgagacgcataattttcttttctgtgagtttgctactggctttttggagtattttgatatgaatacagatccttatcagctcacaaatacagtgcacacggtagaacgaggcattttgaatcagctacacgtacaactaatggagctcagaagctgtcaaggatataagcagtgcaacccaagacctaagaatcttgatgttggaaataaagatggaggaagctatgacctacacagaggacagttatgggcatggatgggaaggttaatcagccccgtctcactgcagacatcaactggcaaggcctagaggagctacacagtgtgaatgaaaacatctatgagtacagacaaaactacagacttagtctggtggactggactaattacttgaaggatttagatagagtatttgcactgctgaagagtcactatgagcaaaataaaacaaataagactcaaactgctcaaagtgacgggttcttggttgtctctgctgagcacgctgtgtcaatggagatggcctctgctgactcagatgaagacccaaggcataaggttgggaaaacacctcatttgaccttgccagctgaccttcaaaccctgcatttgaaccgaccaacattaagtccagagagtaaacttgaatggaataacgacattccagaagttaatcatttgaattctgaacactggagaaaaaccgaaaaatggacggggcatgaagagactaatcatctggaaaccgatttcagtggcgatggcatgacagagctagagctcgggcccagccccaggctgcagcccattcrcaggcacccgaaagaacttccccagtatggtggtcctggaaaggacatttttgaagatcaactatatcttcctgtgcattccgatggaatttcagttcatcagatgttcaccatggccaccgcagaacaccgaagtaattccagcatagcggggaagatgttgaccaaggtggagaagaatcacgaaaaggagaagtcacagcacctagaaggcagcgcntcctcttcactctcctctgattagatgaaactgttaccttaccctaaacacagtatttctttttaacttttttatttgtaaactaataaaggtaatcacagccaccaacattccaagctaccctgggtacctttgtgcagtagaagctagtgagcatgtgagcaagcggtgtgcacacggagactcatcgttataatttactatctgccaagagtagaaagaaaggctggggatatttgggttggcttggttttgattttttgcttgtttgtttgttttgtactaaaacagtattatcttttgaatatcgtagggacataagtatatacatgttatccaatcaagatggctagaatggtgcctttctgagtgtctaaaacttgacacccctggtaaatctttcaacacacttccactgcctgcgtaatgaagttttgattcatttttaaccactggaatttttcaatgccgtcattttcagttagatgattttgcactttgagattaaaatgccatgtctatttgattagtcttatttttttatttttacaggcttatcagtctcactgttggctgtcattgtgacaaagtcaaataaacccccaaggacgacacacagtatggatcacatattgtttgacattaagcttttgccagaaaatgttgcatgtgttttacctcgacttgctaaaatcgattagcagaaaggcatggctaataatgttggtggtgaaaataaataaataagtaaacaaaatgaagattgcctgctctctctgtgcctagcctcaaagcgttcatcatacatcatacctttaagattgctatattttgggttattttcttgacaggagaaaaagatctaaagatcttttattttcatcttttttggttttcttggcatgactaagaagcttaaatgttgataaaatatgactagttttgaatttacaccaagaacttctcaataaaagaaaatcatgaatgctccacaatttcaacataccacaagagaagttaatttcttaacattgtgttctatgattatttgtaagaccttcaccaagttctgatatcttttaaagacatagttcaaaattgcttttgaaaatctgtattcttgaaaatatccttgttgtgtattaggtttttaaataccagctaaaggattacctcactgagtcatcagtaccctcctattcagctccccaagatgatgtgtttttgcttaccctaagagaggttttcttcttatttttagataattcaagtgcttagataaattatgttttctttaagtgtttatggtaaactcttttaaagaaaatttaatatgttatagctgaatctttttggtaactttaaatctttatcatagactctgtacatatgttcaaattagctgcttgcctgatgtgtgtatcatcggtgggatgacagaacaaacatatttatgatcatgaataatgtrctttgtaaaaagatttcaagttattaggaagcatactctgttttttaatcatgtataatattccatgatacttttatagaacaattctggcttcaggaaagtctagaagcaatatttcttcaaataaaaggtgtttaaactttaaaaaaaaaaaaaaaaaaaactcgca

SEQ ID NO: 322 - DNA, 1175 bp, Homo sapiens
ggcctcttacacttaagacaattgcagtcagttagctatgtacatctgtgtaatccactatgattctggctgtaggttcwtcctggatttgagaacatcctttttgctcactcaagctggtacacgtatgcagccatgctcaggatatataaacactgggacttcaacatcatagataaagataccagcagtagtcgcctctctttcagcagttacccagggtttttggagtctctggatgatttttacattcttagcagtggattgatattgctgcagaccacaaacagtgtgtttaataaaaccctgctaaagcaggtaatacccgagactctcctgtcctggcaaagagtccgtgtggccaatatgatggcagatagtggcaagaggtgggcagacatcttttcaaaatacaactctggcacctataacaatcaatacatggttctggacctgaagaaagtaaagctgaaccacagtcttgacaaaggcactctgtacattgtggagcaaattcctacatatgtagaatattctgaacaaactgatgttctacggaaaggatattggccctcctacaatgttcctttccatgaaaaaatctacaactggagtggctatccactgttagttcagaagctgggcttggactactcttatgatttagctccacgagccaaaattttccggcgtgaccaagggaaagtgactgatacggcatccatgaaatatatcatgcgatacaacaattataagaaggatccttacagtagaggtgacccctgtaataccatctgctgccgtgaggacctgaactcacctaacccaagtcctggaggttgttatgacacaaaggtggcagatatctacctagcatctcagtacacatcctatgccataagtggtcccacagtacaaggtggcctccctgtttttcgctgggaccgtttcaacaaaactctacatcagggcatgscagaggtctacaactttgattttattaccatgaaaccaattttgaaacttgatataaaatgaaggagggagatgacggactagaagactgtaaataagataccaaaggcactattttagctatgtttttcccatcagaattatgcaataaaatatattaatttgtcactttcaaaaaaaaaaaaaaaaaaaaaaaaaac

SEQ ID NO: 323 - DNA, 3578 bp, Homo sapiens
  misc feature (10): n equals a,t,g, or c
  misc feature (3552): n equals a,t,g, or c
  misc feature (3557): n equals a,t,g, or c
gcagaytgcntacatcgcggtascccgggccgggggcatcgagaccatcgccaatgagttcagcgaccggtgcaccccgtcagtcatatcatttggatcaaaaaatagaacaatcggagttgcagccaaaaatcagcaaatcactcatgcaaacaatacggtgtctaacttcaaaagatttcatggccgagcattcaaygaccccttcattcaaaaggagaaggaaaacttgagttacgatttggttccattgaaaaatggtggagttggaataaaggtaatgtacatgggtgaagaacatctatttagtgtggagcagataacagccatgttgttgactaagctgaaggaaactgctgaaaacagcctcaagaaaccagtaacagattgtgttatttcagtcccctccttctttacagatgctgagaggcgatctgtgttagatgctgcacagattgttggcctaaactgtttaagacttatgaatgacatgacagctgttgctttgaattacggaatttataagcaggatctcccaagcctggatgagaaacctcggatagtggtttttgttgatatgggacattcagcttttcaagtgtctgcttgtgcttttaacaagggaaaattgaaggtactgggaacagcttttgatcctttcttaggaggaaaaaacttcgatgaaaagttagtggaacatttytgtgcagaatttaaaactaagtacaagttggatgcaaaatccaaaatacgagcactcctacgtctgtatcaggaatgtgaaaaactgaaaaagctaatgagctctaacagcacagaccttccactgaatatcgaatgctttatgaatgataaagatgtttccggaaagatgaacaggtcacaatttgaagaactctgtgctgaacttctgcaaaagatagaagtacccctttattcactgttggaacaaactcatctcaaagtagaagatgtgagtgcagttgagattgttggaggcgctacacgaattccagctgtgaaggaaagaattgccaaattctttggaaaagatattagcacaacactcaatgcagatgaagcagtagccagaggatgtgcattacagtgtgcaatactttccccggcatttaaagttagagaattttccgtcacagatgcagttccttttccaatatctctgatctggaaccatgattcagaagatactgaaggtgttcatgaagtctttagtcgaaaccatgctgctcctttctccaaagttctcacctttctgagaagggggccttttgagctagaagctttctattctgatccccaaggagttccatatccagaagcaaaaataggccgctttgtagttcagaatgtttctgcacagaaagatggagaaaaatctagagtaaaagtcaaagtgcgagtcaacacccatggcattttcaccatctctacggcatctatggtggagaaagtcccaactgaggagaatgaaatgtcttctgaagctgacatggagtgtctgaatcagagaccaccagaaaacccagacactgataaaaatgtccagcaagacaacagtgaagctggaacacagccccaggtacaaactgatgctcaacaaacctcacagtctcccccttcacctgaacttacctcagaagaaaacaaaatcccagatgctgacaaagcaaatgaaaaaaaagttgaccagcctccagaagctaaaaagcccaaaataaaggtggtgaatgttgagctgcctattgaagccaacttggtctggcagttagggaaagaccttcttaacatgtatattgagacagagggtaagatgataatgcaagataaattggaaaaagaaaggaatgatgctaaaaatgcagttgaggaatatgtgtatgagttcagagacaagctgtgtggaccatatgaaaaatttatatgtgagcaggatcatcaaaattttttgagactcctcacagaaactgaagactggctgtatgaagaaggagaggaccaagctaaacaagcatatgttgacaagttggaagaattaatgaaaattggcactccagttaaagttcggtttcaggaagctgaagaacggccaaaaatgtttgaagaactaggacagaggctgcagcattatgccaagatagcagctgacttcagaaataaggatgagaaatacaaccatattgatgagtctgaaatgaaaaaagtggagaagtctgttaatgaagtgatggaatggatgaataatgtcatgaatgctcaggctaaaaagagtcttgatcaggatccagttgtacgtgctcaggaaattaaaacaaaaatcaaggaattgaacaacacatgtgaacccgttgtaacacaaccgaaaccaaaaattgaatcacccaaactggaaagaactccaaatggcccaaatattgataaaaaggaagaagatttagaagacaaaaacaattttggtgctgaacctccacatcagaatggtgaatgttaccctaatgagaaaaattctgttaatatggacttggactagataaccttaaattggcctattccttcaattaataaaatatttttgccatagtatgtgactctacataacatactgaaactatttatattttcttttttaaggatatttagaaattttgtgtattatatggaaaaagaaaaaaagcttaagtctgtagtctttatgatcctaaaagggaaaattgccttggtaactttcagattcctgtggaattgtgaattcatactaagctttctgtgcagtctcaccatttgcatcactgaggatgaaactgacttttgtcttttggagaaaaaaaactgtactgcttgttcaagagggctgtgattaaaatctttaagcatttgttcctgccaaggtagttttcttgcattttgctctccattcagcatgtgtgtgggtgtggatgtttataaacaagactaagtctgacttcataagggctttctaaaaccatttctgtccaagagaaaatgactttttgctttgatattaaaaattcaatgagtaaaacaaaagctagtcaaatgtgttagcagcatgcagaacaaaaactttaaactttctctctcactatacagtatattgtcatgtgaaagtgtggaatggaagaaatgtcgatcctgttgtaactgattgtgaacacttttatgagctttaaaataaagttcatcttatggtgtcatttctaaactgttgattttgtcactaatttaaaaaatgagatgagggagaatatgaattattctagcagaaatgaagttagtgtccagtttttcttttttactgcttatgttctctcttttctaagtgaaaatgtttttctcctgacagaaaaatagcatatgtttattacattaaagcattttaaaaatactataaagtgaataaaacttaaaatcttgccacccagaaraaaacattgttaacacttcgttatacatccttggagccttttacccctaatgatgggggtatatttgkgtgagtgkctatgttatagngctgnaggctggttttaaaaactctg

SEQ ID NO: 324 - DNA, 1715 bp, Homo sapiens
  misc feature (13): n equals a,t,g, or c
  misc feature (14): n equals a,t,g, or c
gaaaaaagaaaannagtctgcccttaagaggtatgaatgattgtgatttggtgctttggacaatgccatgtagagtgcttctttgggggtgagggatagacagaccctaggggctctgagctgaataatcctcttgttgtcccttacatttctctgccagttacacaacagccaatgcggagtctgacaatgagcgggactctgacaaagaaagtgaggacggggaagatgaagtgagctgtgagactgtgaagatggggagaaaggattctcttgacttggaggaagaggcagcttcaggtgcctccagtgccctggaggctggaggttcctcaggcttggaggatgtgctgcccctcctgcagcaggccgacgagctgcacaggggtgatgagcaaggcaagcgggagggcttccagctgctgctcaacaacaagctggtgtatggaagccggcaggactttctctggcgcctggcccgagcctacagtgacatgtgtgagctcactgaggaggtgagcgagaagaagtcatatgccctagatggaaaagaagaagcagaggctgctctggagaagggggatgagagtgctgactgtcacctgtggtatgcggtgctttgtggtcagctggctgagcatgagagcatccagaggcgcatccagagtggctttagcttcaaggagcatgtggacaaagccattgctctccagccagaaaaccccatggctcactttcttcttggcaggtggtgctatcaggtctctcacctgagctggctagaaaaaaaaactgctacagccttgcttgaaagccctctcagtgccactgtggaagatgccctccagagcttcctaaaggctgaagaactacagccaggattttccaaagcaggaagggtatatatttccaagtgctacagagaactagggaaaaactctgaagctagatggtggatgaagttggccctggagctgccagatgtcacgaaggaggatttggctatccagaaggacctggaagaactggaagtcattttacgagactaaccacgtttcactggccttcatgacttgatgccactatttaaggtgggggggcggggaggcttttttccttagaccttgctgagatcaggaaaccacacaaatctgtctcctgggtctgactgctacccactaccactccccattagttaatttattctaacctctaacctaatctagaattggggcagtactcatggcttccgtttctgttgttctctcccttgagtaatctcttaaaaaaatcaagattcacacctgccccaggattacacatgggtagagcctgcaagacctgagaccttccaattgctggtgaggtggatgaacttcaaagctataggaacaaagcacataacttgtcactttaatctttttcactgactaataggactcagtacatatagtcttaagatcataccttacctaccaaggtaaaaagagggatcagagtggcccacagacattgctttcttatcacctatcatgtgaattctacctgtattcctgggctggaccacttgataacttccagtgtcctggcagcttttggaatgacagcagtggtatggggtttatgatgctataaaacaatgtctgaaaagttgcctagaatatattttgttacaaacttgaaataaaccaaatttgatgttaaaaaaaaaaaaa

SEQ ID NO: 325 - DNA, 1688 bp, Homo sapiens
accgggactcgggactcccgggaagtggaccggcagaagagggggctagctagctgtctctgcggaccarggagacccccgcgcccccccggtgtgaggcggcctcacagggccgggtgggctggcgagccgacgcggcggcggaggaggctgtgaggagtgtgtggaacaggacccgggacagaggaaccatggctccgcagaacctgagcaccttttgcctgttgctgctatacctcatcggggcggtgattgccggacgagatttctataagatcttgggggtgcctcgaagtgcctctataaaggatattaaaaaggcctataggaaactagccctgcagcttcatcccgaccggaaccctgatgatccacaagcccaggagaaattccaggatctgggtgctgcttatgaggttctgtcagatagtgagaaacggaaacagtacgatacttatggtgaagaaggattaaaagatggtcatcagagctcccatggagacattttttcacacttctttggggattttggtttcatgtttggaggaacccctcgtcagcaagacagaaatattccaagaggaagtgatattattgtagatctagaagtcactttggaagaagtatatgcaggaaattttgtggaagtagttagaaacaaacctgtggcaaggcaggctcctggcaaacggaagtgcaattgtcggcaagagatgcggaccacccagctgggccctgggcgcttccaaatgacccaggaggtggtctgcgacgaatgccctaatgtcaaactagtgaatgaagaacgaacgctggaagtagaaatagagcctggggtgagagacggcatggagtacccctttattggagaaggtgagcctcacgtggatggggagcctggagatttacggttccgaatcaaagttgtcaagcacccaatatttgaaaggagaggagatgatttgtacacaaatgtgacaatctcattagttgagtcactggttggctttgagatggatattactcacttggatggtcacaaggtacatatttcccgggataagatcaccaggccaggagcgaagctatggaagaaaggggaagggctccccaactttgacaacaacaatatcaagggctctttgataatcacttttgatgtggattttccaaaagaacagttaacagaggaagcgagagaaggtatcaaacagctactgaaacaagggtcagtgcagaaggtatacaatggactgcaaggatattgagagtgaataaaattggactttgtttaaaataagtgaataagcgatatttattatctgcaaggtttttttgtgtgtgtttttgtttttattttcaatatgcaagttaggcttaatttttttatctaatgatcatcatgaaatgaataagagggcttaagaatttgtccatttgcattcggaaaagaatgaccagcaaaaggtttactaatacctctccctttggggatttaatgtctggtgctgccgcctgagtttcaagaattaaagctgcaagaggactccaggagcaaaagaaacacaatatagagggttggagttgttagcaatttcattcaaaatgccaactggagaagtctgtttttaaatacattttgttgttatttttaaaaaaaaaaaaaaaaaaaaaaaaaaaaaaaaaaa

SEQ ID NO: 326 - DNA, 1632 bp, Homo sapiens
  misc feature (1540): n equals a,t,g, or c
  misc feature (1560): n equals a,t,g, or c
  misc feature (1566): n equals a,t,g, or c
  misc feature (1595): n equals a,t,g, or c
  misc feature (1615): n equals a,t,g, or c
gcccacgcgtccgcccacgcgtccgcccacgcgtccgggggggtgggggcgggtggttgcctgcgggaggccgccgcgggtcatgtgaccggaagggctcctcacggacgccgtccctcctcggcgcggcctgagcgcccggcccgaccccggccatggggtgctgctacagcagcgagaacgaggactcggaccaggaccgagaggagcggaagctgctgctggaccctagcagcccccctaccaaagctctcaatggagccgagcccaactaccacagcctgccttccgctcgcactgatgagcaggccctgctctcttccatccttgccaagacagccagcaacatcattgatgtgtctgctgcagactcacagggcatggagcagcatgagtacatggaccgtgccaggcagtacagcacccgcttggctgtgctgagcagcagcctgacccattggaagaagctgccaccgctgccgtctcttaccagccagccccaccaagtgctggccagtgagcccatcccgttctctgatttgcagcaggtctccaggatagctgcttatgcctacagtgcactttctcagatccgtgtggacgcaaaagaggagctggttgtacagtttgggatcccatgaagagaggggtccttggacagctcttctcctctcttcatcccatctctaccccacccccttggcccccagcctcactgcggcttatacagtaccctaacctgctactaatcacagagaaaaatgtgaagaaggaggagaagaggaaggctagaagcctgagcaagtgagggtagaaccttttgggactggcctttgaagctctggccagggatggggtgggggccaaaaggacagagcctggtatgtcttcatagtcattgagaatgtggagataccagtttgggtggggggtgatcaccaggggacctagggagatccccttcccaccctctctgttggcctcagagtcactcctgccccctctccctgacttggtgctcacatgcacctcactagggtttgtgaccagggtctggatgagcttgaatttgaatgaattgagtttgtatttctagaaccctgggtttttacatgtttggtctttttttgttttggtttgtcaccctcgataaaggaagtatattcatccaaaaaaaaaaaaaaaaacycgagggggggcccggwacccaattcgccctatagtgagtcgtattacaattcactggccgtcgttttacaacgtcgtgactgggaaaaccctggcgttacccaacttaatcgccttgcagcacatccccctttcgccagctggcgtaatagcgaagaggcccgcaccgatcgcccttcccaacagttgcgcagcctgaatggcgaatggcaaattgtaagcgttaatattttggtaaaattcgcgttaaatttttggtaaatcaagctcattttttaaccaataggccgaaatcggcaaaaatcccttataaatcaaaagaatagaccgagataggggttgaatggtggtncaatttgggaacaaggagtnccactntttaaaagaaacgtggacttccaacgtcnaaaggggcgaaaaaacccgnctattcaaggggcgaat

SEQ ID NO: 327 - DNA, 2222 bp, Homo sapiens
  misc feature (2): n equals a,t,g, or c
  misc feature (2212): n equals a,t,g, or c
  misc feature (2214): n equals a,t,g, or c
  misc feature (2215): n equals a,t,g, or c
gncccgaggctgcgtggtggagggcaaccccgtgctggcaggatcctgcgactcaacgtgcagccatctggtggtgcccatcctgctcctggtcagcctgggctcggccctggcctgtctcacccacacaccctccttcatgctcatcctaagaggagtgaagaaagaagacaagactttggctgtgggcatccagttcatgttcctgaggattttggcctggatgcccagccccgtgatccacggcagcgccatcgacaccacctgtgtgcactgggccctgagctgtgggcgtcgagctgtctgtcgctactacaataatgacctgctccgaaaccggttcatcggcctccagttcttcttcaaaacaggttctgtgatctgcttcgccttagttttggctgtcctgaggcagcaggacaaagaggcaaggaccaaagagagcagatccagccctgccgtagagcagcaattgctagtgtcggggccagggaagaagccagaggattcccgagtgtgagctgtcttggggccccacctggccaagagtagcagccacagcagtacctcctctgagtcctttgcccaagattgggtgtcaagagccctgtgttccattctggctcctccactaaattgctgtgtgacttcaggcaagacattgatcctctctcagcctttgcttgctagtctgaaccaaagagttgtttgggcatttgctgtgttggccatttctggagcaagagggtcttcttcctccttcccccagccagccagctgtcctggggccaggctttcctgggtggaaagaagtatacctttccctggggccctaggatagcaaagtgagccatagtgggccaggctgccctccatgctgggccccagcccaggtctgcactcgcctggatcaccttctttgagccttagccatctcctgtcaggtaggaatgaacttgccagccttcaggctcgttcagctatgaccatctgtgcggtcagggtacactcagctctcctccccaactccagcagcctttaagaagtgtccctttggcgccccctggaggcagagcactgagctggaccctgggtagactcccacagggaggacggagctggcctcaggagtgggacacccagacttggcagggccttcaagaggcctgtgtgggggccccaggaatccttagctgaagcggggagactcactctccatctcaggaaattctagcccttgccctcagggagccacggttgagggtgaggcccaacacctgccttagggccctgggtgggcaagtctgggccctggggtagggagggagactcaggcccacacttgggtattttctaatttcagacaaacacacactcagcgcgcactcactgattcctacacattgccaagatttcacacatgtgaccaggggccaccaaagtccctgtgacctttgtgactaggatcctaatttctctattttctcctgggtgcctgggtctgtgtcacctggggcagtgtggataatgtttagttctgtgacactgttttttgggggtggcacctggttctccgatgcctgggctggtgtcaggcccaggactgtagtgctgggagcagtaaagctcagctctgtgtaatgagtgatgctatggcttgctcgtgtcttatgatccaatccttttctacatcagcccttgttttgttttatggctagtcttatctggcctggttatttccttgcggggaggagagggtttgctaatctgctcccagcccaacctattaccaccccacctcgctgggacctactgctcgggaggcagcagacagggagccaccagcagtggcttcctggccctgtgctgggggtggggggaagctgggggcacatgtggcccttgccttctgagcagctcccagtgccagggctttgagactttcccacatgataaaagaaaagggaggtacagaagttccaattccctttttattttgctggttggtatctgtaaatgtttaataaatatctgagcatgtatctatcaacgccaagaatttcaaagtctccttcaacaatatgaggcttttaggatgtttatattccttcatccctcttgtttcccaggttttgcagggaaaaaaagtctggaattatagatacagcttattattaaatttgttcttgcataaaaaaaaaaaaaaaraacncnnggggggg

SEQ ID NO: 328 - DNA, 2167 bp, Homo sapiens
gcgccggacccagtacctcggctccccggggccggaccgaggccgcaagcagcgcgcggrgtgtggggcggacmcaggagatgaaatgacaacgtcaaccctccagaaagccattgatctggtgacgaaagccacagaggaggacaaagccaagaactacgaggaggcgctgcggctgtaccagcatgcggtggagtacttcctccacgctatcaagtatgaggcccacagcgacaaggccaaggagagcattcgagccaagtgcgtgcagtacctagaccgggccgagaagctgaaggattatttacgargcaaagagaaacacggcaagaagccagtcaaagagaaccagagtgagggcaagggcagtgacagtgacagtgaaggggataatccggagaaaaagaaactgcaagaacagctgatgggtgccgtcgtgatggagaagcccaacatacggtggaacgacgtggccgggctggagggggccaaggaggccctcaaagaagctgtcattttgccaatcaaattcccacacttgttcacaggcaagcgcaccccctggcgggggattctgctgttcggaccccctggcacagggaaatcctacctggccaaagccgtggcaacagaggccaacaactccaccttcttctctgtgtcctcctcagatctgatgtccaagtggctgggggagagtgaaaagctggtcaagaacctgtttgagctggccaggcagcacaagccctccatcatcttcatcgatgaggtggattccctctgcgggtcccgaaatgaaaatgagagtgaggccgcccggaggatcaaaacggagttcttggtccagatgcagggggtggggaataacaatgatgggactctggttcttggagccacaaacatcccatgggtgttggattcggccatcaggaggaggtttgaaaaacgaatttatatccccttgccggaggaagctgcccgcgcccagatgttccggttgcatctcgggagcactccccacaacctcacggatgcaaacatccacgagctggcccggaagacggaaggctactcgggcgcggacatcagcatcatcgtgcgggactctctcatgcagcccgtgaggaaggtgcagtcggccacacacttcaaaaaggtctgtggcccctctcgcaccaaccccagcatgatgattgatgacctcctgactccatgctcaccaggggacccaggagccatggagatgacttggatggatgtccctggggacaaactcttagagcctgtggtttgcatgtcggacatgctgcggtctctggccaccacccggcccacggtgaatgcagacgacctcctgaaagtgaagaaattctcagaggactttgggcaagagagttaaaagctgcttcacttgggcaatggtgaaggtgggaggttgattggggcaaatccaggcactccccatgtcaacagccagacagggctccagggcttgtcccagtcaatacagagttccctctgctgtctggccgtctgccagggagccagaaggaagggccttgcagccacagagacactccactgccctggggcacacagtggacactgctcttcctacttcctcctctcctggatgctcatcagctccttctgcctcccccccttttttttccatcttttgttcccctaaattaatgctgcttggattttcatcttatttataaagataaaatcacctggaagtgtcaaggagtggggcggggtggcgggggagaagcagccgtgctgccaggtcacccagacctccagacagccggctagccccactgcccgttccttttacgcccaagttttgctccttgagagcagattggctgatgcccctgcaaccccagcccaagctctgcctcaaagaccgagtgacataagccattcccaccctcctaggttcacatccagggctgtgtcttccttgggggaggagatggtgtcgtttagatcagggtaaggcagtcaggcgggtgttcaccactgccttttcttcctctgagcgtgagaacactgaacccagccactgcccctgggtccctgtcctggaaatggtctaataaatccttttcccttcttgagctaaaaaaaaaaaaaaaaaaaaaaaaaaaaaaaaaaa

SEQ ID NO: 329 - DNA, 2373 bp, Homo sapiens
  misc feature (70): n equals a,t,g, or c
tataccgacggcatctccttcgaccctgccctcatccatgacaatgcctcatccacccaccccgaagagncctgctctcatgattggggcctgctggactgaggagaagaacaaagagaaggaaaaggggagacaacagtacagacaccacccaaggagaccctttgtcgatccaccactacttccatggctacctggctggtttcagcgtgcgctcaggtcgcctggagagccgcgaggtcatcgagtgcctctatgcatgtcgggaggggctggactatagggatttcgagagcctgggcaaaggcatgaaggtccacgtgaacccctcacagtccctgctcaccctggagggggatgatgtggagaccttcaaccatgccctgcagcatgtggcttacatgaacactctgcgctttgccacgcccggcgtcaggcccctgcgcctcaccactgctgtcaagtgcttcagcgaagagtcctgcgtctccatccctgaagtggagggctacgtggtcgtccttcagcctgacgscccccagatcctgctgagtggcactgytcattttgcccgcccagctgtggactttgagggaaccaacggcgtccctttgttccctgatcttcaaatcacctgctccatttctcaccaggtggaggccaaaaaggatgagagttggcagggcacagtgacagacacacgcatgtcggatgagattgtgcacaacctggatggctgtgaaatttctctggtgggggatgacctggatcccgagcgggaaagcctgctcctggacacaacctctctgcagcagcgggggctggagctcaccaacacatctgcctacctcactattgctggggtggagagcatcactgtgtatgaagagatcctgaggcaggctcgttatcggctgcgacacggagctgccctctacaccaggaagttccggctttcctgctcggaaatgaatggccgttactccagcaatgaattcatcgtggaggtcaatgtcctgcacagcatgaaccgggttgcccaccccagccacgtgctcagctcccagcagttcctgcaccgtggtcaccagcccccgcctgagatggctggacacagcctagccagctcccacagaaactccatgatacccagcgccgcaaccctcatcattgtggtgtgcgtgggcttcctggtgctcatggtcgtcctgggcctggtgcgcatccattcccttcaccgccgcgtctcaggggccggcgggcctccaggggcctccagtgaccccaaggacccagacctcttctgggatgactcagctctcaccatcattgtgaaccccatggagtcctaccagaatcggcagtcctgtgtgacgggggctgttgggggccagcaggaggatgaggacagcagtractcggaggtggccgattcccccagcagcgacgagagacgcatcatcgagacccccccacaccgctactaaggcctacacctctccccacgcagagggggaattctgccctggtgaaacagacactccagacatgggagaaggactttctgggaacacagagaccaagagggagagaggcttcagaaccagtcctcctttcatttcaaaaccccagcgggccctctggagtccgccctgcccctcccccggccccccatccctcacttctgggctgtcatgctcctggtgtgccccttgcactggggctggctgggttggaaagtgggctggacttcagctgcctttctacccccaatggcagctgcccccttagcactcactgtgttggggagagggtgacgattgcaatggctggggctggggctggggctgggggtgggattgaaggaaaccctctcctctccccttcccttctctctcctgtccatgggaagcttttccccctctgcagggctccctcagctggaccatcgtccctgcttctcttatgatcgccccacctcatttccatttcagtctggggaccccatttctccctcctttccaacttccttcctttcttgtcctgtttcccttcctgcccttgcagtcctgaggtcctgcagccccggcccctcctccgtgacctggtgtggccaggctgcggggacgggaggggacgtgggggccccgggtgtacatatataatgtatattttttcaatgttgtcgtgagtgcagcccatgttcctgcgtgcagctcacggccttgtgtgtatgtgtgtgtgtgtgtgtgtgaggcatcgtcatgtcctggggcaggggcggggggttgggtgtggtgagggaggggacatatcctagggttttcaaataaaacaatcagaaaaaaaaaaaaaaatgccccccgggggggg

SEQ ID NO: 330 - DNA, 1369 bp, Homo sapiens
  misc feature (1323): n equals a,t,g, or c
  misc feature (1329): n equals a,t,g, or c
  misc feature (1330): n equals a,t,g, or c
  misc feature (1343): n equals a,t,g, or c
  misc feature (1358): n equals a,t,g, or c
gctcccggctaatttttagaaacaaatatttaaaatgacatattctcccaatacaatctatttagatctggagaaggaaaaatcagatatttatgatatagttttattttaattttgaattatttgtgtcacagctcagctttttggaagacaaactcaaacacctataatttcatttatatttctaattcacttggaacctttctgctttatgttacctagaaaatgataatttgtgtaacccaaaacttctaaaataaattgcttaatccttgaaatatgttattggaaaattttaagcagtgcttaaacaccattaaattattatgaacttgtaattcagaattgagtaaagaaatattttttctagtccttcatatattgaaaacttgccacatgacattgtatcgtcttcattttccagaagatgcgttggtgtgccataggtttctaacttccttgaaaatagttttttaagtcaattgtaaatatacgtattattgktaaaagtaactttaaactgcaacacatagcttcaaaacaatatagagattttgkaataccttataagkggagktggctaaaawaccytatccatataaaactwattctattctttgcatgcttattttgtgtgttggttgctagcttaaagtttgatttgktgttactctttgtgkgccaaattcactaggcaagcggatttttcctcagacttcaaaaaataattcttttaagaaaaaatgtaaaaatgtttattctaaaaagctgcattaaagggacaacctataaaaagttttgctagctcatctttagaaggaagaaagaatattagcttgggtgatgtttaatttgggtggcgatagtttctgtaggctaaacttgatgagaaaagtgtacctactctataaaggtaataaatgtaaaacctcttgctgttattgaggaagctcttcaactaccctaaatttcacaaatgtaacttataacactatgaaaagatttgaccaacaatttacgtttgctgtgtgcttagtttttgtttaagcatattctttgctgaattctgtgttcatgagagttagggtgttttatgctcttgaactaatttataacatatttaatatattaccagttaagatataaaatcattgtacatagcgaattgtaaagcagctattaaagtaggtgaaataaagtatatatttgccggttatccatatcytttagaagtcctgacagaacaaccagtttatttgccataggtagcttctgttttgaaggaaggtaaagttataaggaaacttcaaatactattaaganggtggnnaagggaatttctncaggaatttaattgnaaaaagcttag

SEQ ID NO: 331 - DNA, 2864 bp, Homo sapiens
  misc feature (2850): n equals a,t,g, or c
  misc feature (2858): n equals a,t,g, or c
  misc feature (2860): n equals a,t,g, or c
cgggcgcctcctggagagcaaggacgcgggggagcagagatgatccgagccgcgccgccgccgctgttcctgctgctgctgctgctgctgctgcagtgtcctgggcgtcccgaggcgaggcagcccccgaccaggacgagatccagcgcctccccgggctggccaagcagccgtctttccgccagtactccggctacctcaaaggctccggctccaagcacctccactactggtttgtggagtcccagaaggatcccgagaacagccctgtggtgctttggctcaatgggggtcccggctgcagctcactagatgggctcctcacagagcatggccccttcctggtccagccagatggtgtcaccctggagtacaacccctattcttggaatctgattgccaatgtgttatacctggagtccccagctggggtgggcttctcctactccgatgacaagttttatgcaactaatgacactgaggtcgcccagagcaattttgaggcccttcaagatttcttccgcctctttccggagtacaagaacaacaaacttttcctgaccggggagagctatgctggcatctacatccccaccctggccgtgctggtcatgcaggatcccagcatgaaccttcaggggctggctgtgggcaatggactctcctcctatgagcagaatgacaactccctggtctactttgcctactaccatggccttctggggaacaggctttggtcttctctccagacccactgctgctctcaaaacaagtgtaacttctatgacaacaaagacctggaatgcgtgaccaatcttcaggaagtggcccgcatcgtgggcaactctggcctcaacatctacaatctctatgccccgtgtgctggaggggtgcccagccattttaggtatgagaaggacactgttgtggtccaggatttgggcaacatcttcactcgcctgccactcaagcggatgtggcatcaggcactgctgcgctcaggggataaagtgcgcatggaccccccctgcaccaacacaacagctgcttccacctacctcaacaacccgtacgtgcggaaggccctcaacatcccggagcagctgccacaatgggacatgtgcaactttctggtaaacttacagtaccgccgtctctaccgaagcatgaactcccagtatctgaagctgcttagctcacagaaataccagatcctattatataatggagatgtagacatggcctgcaatttcatgggggatgagtggtttgtggattccctcaaccagaagatggaggtgcagcgccggccctggttagtgaagtacggggacagcggggagcagattgccggcttcgtgaaggagttctcccacatcgcctttctcacgatcaagggcgccggccacatggttcccaccgacaagcccctcgctgccttcaccatgttctcccgcttcctgaacaagcagccatactgatgaccacagcaaccagctccacggcctgatgcagcccctcccagcctctcccgctaggagagtcctcttctaagcaaagtgcccctgcaggccgggttctgccgccaggactgcccccttcccagagccctgtacatcccagactgggcccagggtctcccatagacagcctgggggcaagttagcactttattcccgcagcagttcctgaatggggtggcctggccccttctctgcttaaagaatgccctttatgatgcactgattccatcccaggaacccaacagagctcaggacagcccacagggaggtggtggacggactgtaattgatagattgattatggaattaaattgggtacagcttcaaatcccgtcttctctgtggcactgggggttagctcgtgccgaattcggcacgagctcgtgccgaattcgatatcaagcttatcgataccgtcgacatcgcaacagcccaattatatataattttatatattactatataaatatgaatcttgcaccggagaaattgtaagcattattatgccgactcttttttatcttattttaaaatggaatmccggacatgttaattaatcgcaatattgtggcgttatttgcgttgccttttatggcaagcgcaactgcttctgaattatccattggtgctggtgcggcttataatgaatcgccttatcgcggttataatgaaaatacgaaggcaattccgctgattagttatgaaggtgatactttttatgttcgtcagaccacgttaggttttattctgtcgcaaagtgaaaaaaatgaacttagcctgaccgcatcctggatgccgctggaatttgaccctaccgataatgacgattatgccatgcaacagcttgataagcgtgatagtacggctatggcgggggttgcctggtatcaccacgagcgttggggaaccgtgaaagcctctgcagctgcggacgttctggataacagcaacggctgggtgggggagctatcggtattccacaaaatgcagataggtcgtctgtcgctgacacctgcgctgggcgttctctattatgacgagaatttcagtgactattactatggcatttcagagagtgagtcccgtcgtagcggtctggcaarttattccgcgcargatgcctgggtgccctatgtcagcctgacggcaaaatacccgataggagagcacgtcgtattgatggcgagcgcaggatacagcgagctgccggaagagattaccgmcagcccgatgattgatcgtaatgagagttwaacctttgtcaccggggtgagctggcgtttttaattcaccggtggatgtcggtrcggcccggaggccaattcgnactggagnanaagg

SEQ ID NO: 332 - DNA, 1985 bp, Homo sapiens
  misc feature (360): n equals a,t,g, or c
  misc feature (1985): n equals a,t,g, or c
ggcagaggaggagagagtgaaggattccagaggacatccggaacacggtggggcaacgtgcccttggagtggtacgatgacttcccccacgtgggctacgacctggatggcaggcgcatctacaagcccctgcggacccgggatgagctggaccagttcctggacaagatggacgatcctgactactggcgcaccgtgcaggacccgatgacagggcgggacctgagactgacggatgagcaggtggccctggtgcggcggctgcagagtggccagtttggggatgtgggcttcaacccctatgagccggctgtcgacttsttcagcggggacgtcatgatccacccggtgaccaaccgnccggccgacaagcgcarcttcatcccctccctggtggagaaggagaaggtctctcgcatggtgcacgccatcaagatgggctggatccarcctcgccggccccgagaccccacccccagcttctatgacctgtgggcccaggaggaccccaacgccgtgctcgggcgccacaagatgcacgtacctgctcccaagctggccctgccagccacgccgagtcgtacaacccaccccctgaatacctgctcagcgaggaggagcgcttggcgtgggaacagcaggagccaggcgagaggaagctgagctttttgccacgcaagttcccgagcctgcgggccgtgcctgcctacggacgcttcatccaggaacgcttcgagcgctgccttgacctgtacctgtgcccacggcagcgcaagatgagggtgaatgtagaccctgaggacctcatccccaagctgcctcggccgagggacctgcagcccttccccacgtgccaggccctggtctacaggggccacagtgaccttgtccggtgcctcagtgtctctcctgggggccagtggctggtttcaggctctgacgacggctccctgcggctctgggaggtggccactgcccgctgtgtgaggactgttcccgtggggggcgtggtgaagagtgtggcctggaaccccagccccgctgtctgcctggtggctgcagccgtggaggactcggtgctgctgctgaacccagctctgggggaccggctggtggcgggcagcacagatcagctgttgagcgccttcgtcccgcctgaggagccccccttgcagccggcccgctggctggaggcctcagaggaggagcgccaagtgggcctgcggctgcgcatctgccacgggaagccagtgacgcaggtgacctggcacgggcgtggggactacctggccgtggtgctggccacccaaggccacacccaggtgctgattcaccagctgagccgtcgccgcagccagagtccgttccgccgcagccacggacaggtgcagcgagtggccttccaccctgcccggcccttcctgttggtggcgtcccagcgcagcgtccgcctctaccacctgctgcgccaggagctcaccaagaagctgatgcccaactgcaagtgggtgtccagcctggcggtgcaccctgcaggtgacaacgtcatctgtgggagctacgatagcaagctggtgtggtttgacctggatctttccaccaagccatacaggatgctgagacaccacaagaaggctctgcgggctgtggccttccacccgcggtacccactctttgcgtcaggctcggacgacggcagtgtcatcgtctgccatggcatggtgtacaatgaccttctgcagaaccccttgctggtgcccgtcaaggtgctgaagggacacgtgctgacccgagatctgggagtgctggacgtcatcttccaccccacccagccgtgggtcttctcctcgggggcagacgggactgtccgcctcttcacctagctgttctgcctgcctggggctggggtggtcgtgctgaagtcaacagagcctttaccctgtrmaaaaaaaaaaaaaaaaaaaaatcaaggggggggccgggtn

SEQ ID NO: 333 - DNA, 3087 bp, Homo sapiens
  misc feature (143): n equals a,t,g, or c
  misc feature (166): n equals a,t,g, or c
agccgcatctattggcagctttgttattgatcagaaactgctcgccgccgacttggcttccagtctggctgcgggcaacccttgagttttcgcctctgtcctgtcccccggaactgacaggtgctcccagcaacttgctgggnacttctcgccgctcccccgcgtncccaccccctcattcctccctcgccttcacccccacccccaccacttcgccacagctcaggatttgtttaaaccttgggaaactggttcaggtccaggttttgctttgatccttttcaaaaactggagacacagaagagggctctaggaaaaagttttggatgggattatgtggaaactaccctgcgattctctgctgccagagcaggctcggcgcttccaccccagtgcagccttcccctggcggtggtgaaagagactcgggagtcgctgcttccaaagtgcccgccgtgagtgagctctcaccccagtcagccaaatgagcctcttcgggcttctcctgctgacatctgccctggccggccagagacaggggactcaggcggaatccaacctgagtagtaaattccagttttccagcaacaaggaacagaacggtaggaactatatccaagcatctggactggcatagaaaagaggagaaagaacatttaaaaggagtacaagatcctcagcatgagagaattattactgtgtctactaatggaagtattcacagcccaaggtttcctcatacttatccaagaaatacggtcttggtatggagattagtagcagtagaggaaaatgtatggatacaacttacgtttgatgaaagatttgggcttgaagacccagaagatgacatatgcaagtatgattttgtagaagttgaggaacccagtgatggaactatattagggcgctggtgtggttctggtactgtaccaggaaaacagatttctaaaggaaatcaaattaggataagatttgtatctgatgaatattttccttctgaaccagggttctgcatccactacaacattgtcatgccacaattcacagaagctgtgagtccttcagtgctacccccttcagctttgccactggacctgcttaataatgctataactgcctttagtaccttggaagaccttattcgatatcttgaaccagagagatggcagttggacttagaagatctatataggccaacttggcaacttcttggcaaggcttttgtttttggaagaaaatccagagtggtggatctgaaccttctaacagaggaggtaagattatacagctgcacacctcgtaacttctcagtgtccataagggaagaactaaagagaaccgataccattttctggccaggttgtctcctggttaaacgctgtggtgggaactgtgcctgttgtctccacaattgcaatgaatgtcaatgtgtcccaagcaaagttactaaaaaataccacgaggtccttcagttgagaccaaagaccggtgtcaggggattgcacaaatcactcaccgacgtggccctggagcaccatgaggagtgtgactgtgtgtgcagagggagcacaggrggatagccgcatcaccaccagcagctcttgcccagagctgtgcagtgcagtggctgattctattagagaacgtatgcgttatctccatccttaatctcagttgtttgcttcaaggacctttcatcttcaggatttacagtgcattctgaaagaggagacatcaaacagaattaggagttgtgcaacagctcttttgagaggaggcctaaaggacaggagaaaaggtcttcaatcgtggaaagaaaattaaatgttgtattaaatagatcaccagctagtttcagagttaccatgtacgtattccactagctgggttctgtatttcagttctttcgatacggcttagggtaatgtcagtacaggaaaaaaactgtgcaagtgagcacctgattccgttgccttgcttaactctaaagctccatgtcctgggcctaaaatcgtataaaatctggatttttttttttttttttgctcatattcacatatgtaaaccagaacattctatgtactacaaacctggtttttaaaaaggaactatgttgctatgaattaaacttgtgtcrtgctgataggacagactggatttttcatatttcttattaaaatttctgccatttagaagaagagaactacattcatggtttggaagagataaacctgaaaagaagagtggccttatcttcactttatcgataagtcagtttatttgtttcattgtgtacatttttatattctccttttgacattataactgttggcttttctaatcttgttaaatatatctatttttaccaaaggtatttaatattcttttttatgacaacttagatcaactatttttagcttggtaaatttttctaaacacaattgttatagccagaggaacaaagatgatataaaatattgttgctctgacaaaaatacatgtatttcattctcgtatggtgctagagttagattaatctgcattttaaaaaactgaattggaatagaattggtaagttgcaaagactttttgaaaataattaaattatcatatcttccattcctgttattggagatgaaaataaaaagcaacttatgaaagtagacattcagatccagccattactaacctattccttttttggggaaatctgagcctagctcagaaaaacataaagcaccttgaaaaagacttggcagcttcctgataaagcgtgctgtgctgtgcagtaggaacacatcctatttattgtgatgttgtggttttattatcttaaactctgttccatacacttgtataaatacatggatatttttatgtacagaagtatgtctcttaaccagttcacttattgtactctggcaatttaaaagaaaatcagtaaaatattttgcttgtaaaatgcttaatatcgtgcctaggttatgtggtgactatttgaatcaaaaatgtattgaatcatcaaataaaagaatgtggctattttggggagaaaattaaaaaaaaaaaaaaaagggcggccgc

SEQ ID NO: 334 - DNA, 898 bp, Homo sapiens
  misc feature (849): n equals a,t,g, or c
  misc feature (886): n equals a,t,g, or c
ggcacgagggcaagttggcctctctgttgtaaattagtggttaaggttatctattattgccacttttccagcgctaaaggctgttttggaaccagtgttgcttgttccgcgggtgattggcttttttttttggcaaaccagttattcaagtttctggtctttaaaaaactctgtggcggtacggtaaccgaggaggttccagcgcggcggaagtaccccgcgggtgggtgtgtgcgcaaggccagggccaraggggcacgtggcgccgggaggagagagaatgtcttttcgaggcggaggtcgtggaggctttaatcgaggtggtggaggtggcggcttcaaccgaggcggcagcagcaaccacttccgaggtggaggcggcggtggaggcggcggcaatttcagaggcggcggcaggggaggatttggacgagggggtggccgcggaggctttaacaaaggccaagaccaaggacctccagaacgtgtagtcttattaggagagttcctgcatccctgtgaagatgacatagtttgtaaatgtaccacagatgaaaataaggtgccttatttcaatgctcctgtttacttagaaaacaaagaacaaattggaaaagtggatgaaatatttggacaactcagagattttkatttttcagttaagttgtcagaaaacatgaaggcttcatcctttaaaaaactacagaagttttatatagacccatataagctgctgccactgcagaggtggtggcagaggcggtggttttagaggtggaagaggaggtggaggtgggggcttcagaggaggaagaggtggtggtttcagagggagaggacattaagtgnaacagttgacagacatcaccagttgacttctgcattnaacctgcatgga

SEQ ID NO: 335 - DNA, 944 bp, Homo sapiens
  misc feature (892): n equals a,t,g, or c
  misc feature (908): n equals a,t,g, or c
  misc feature (917): n equals a,t,g, or c
  misc feature (936): n equals a,t,g, or c
cacttttattaatttgcatgtccttttaatatttatttattcaaatactaccgtatggcccaccataattacccccatactccttacactattcctcatcacccaactaaaaatattaaacacaaactaccacctacctccctcaccaaagcccataaaaataaaaaattataacaaaccctgagaaccaaaatgaacgaaaatctgttcgcttcattcattgcccccacaatcctaggcctacccgccgcagtactgatcattctatttccccctctattgatccccacctccaaatatctcatcaacaaccgactaatcaccacccaacaatgactaatcaaactaacctcaaaacaaatrataaccatacacaacactaaaggacgaacctgatctcttatactagtatccttaatcatttttattgccacaactaacctcctcggactcctgcctcactcatttacaccaaccacccaactatctataaacctagccatggccatccccttatgagcgggcgcagtgattataggctttcgctctaagattaaaaatgccctagcccacttcttaccacaaggcacacctacaccccttatccccatactagttattatcgaaaccatcagcctactcattcaaccaatagccctggccgtacgcctaaccgctaacattactgcaggccacctactcatgcacctaattggaagcgccaccctagcaatatcaaccattaaccttccctctacacttatcatcttcacaattctaattctactgactatcctagaaatcgctgtcgccttaatccaagcctacgttttcacacttctagtaagcctctacctgcacgacaacacataaaaaaaaaaaaaaaaaaaanmmcaaggggggggccngggttcccnattttcccccccaaaaagngaaattct

SEQ ID NO: 336 - DNA, 1607 bp, Homo sapiens
  misc feature (1162): n equals a,t,g, or c
  misc feature (1449): n equals a,t,g, or c
ggcggccggacggkaagttccccggagaaggatcctscagcmcgagtcccgtcctcaggcttccccaatccaggggactcggcgccgggacgctgctatggacgacattttcactcagtgccgggagggcaacgcagtcgccgttcgcctgtggctggacaacacggagaacgacctcaaccagggctattgcagtacaaggcagacatcaatgcagtgaatgaacacgggaatgtgcccctgcactatgcctgtttttggggccaagatcaagtggcagaggacctggtggcaaatggggcccttgtcagcatctgtaacaagtatggagagatgcctgtggacaaagccaaggcacccctgagagagcttctccgagagcgggcagagaagatgggccagaatctcaaccgtattccatacaaggacacattctggaaggggaccacccgcactcggccccgaaatggaaccctgaacaaacactctggcattgacttcaaacagcttaacttcctgacgaagctcaacgagaatcactctggagagctatggaagggccgctggcagggcaatgacattgtcgtgaaggtgctgaaggttcgagactggagtacaaggaagagcagggacttcaatgaagagtgtccccggctcaggattttctcgcatccaaatgtgctcccagtgctaggtgcctgccagtctccacctgctcctcatcctactctcatcacacactggatgccgtatggatccctctacaatgtactacatgaaggcaccaatttcgtcgtggaccagagccaggctgtgaagtttgctttggacatggcaaggggcatggccttcctacacacactagagcccctcatcccacgacatgcactcaatagccgtagtgtaatgattgatgaggacatgactgcccgaattagcatggctgatgtcaagttctctttccaatgtcctggtcgcatgtatgcacctgcctgggtagcccccgaagctctgcagaagaagcctgaagacacaaacagacgctcagcagacatgtggagttttgcagtgcttctgtgggaactggtgacacgggaggtaccctttgctgacctctccaatatggagattggaatgaaggtggcattggaaggccttcggnctaccatcccaccaggtatttcccctcatgtgtgtaagctcatgaagatctgcatgaatgaagaccctgcaaagcgacccaaatttgacatgattgtgcctatccttgagaagatgcaggacaagtaggactggaaggtccttgcctgaactccagaggtgtcgggacatggttgggggaatgcacctccccaaagcagcaggcctctggttgcctcccccgcctccagtcatggtactaccccagccatggggtccatccccttcccccatccctaccactgtkgncccaagaggggcgggctcagagctttgtcacttgccacatggtgtctcccaacatgggagggatcagccccgcctgtcacaataaagtttattatgaaaamaaaaaaaaaaaaaaaaaaaaaaaaaaaaaaaaaaaaaaaaaaaaaaaaacaaaaaaa

SEQ ID NO: 337 - DNA, 3156 bp, Homo sapiens
actgggagggggagccgggggttccgacgtcgcagccgagggaacaagccccaaccggatcctggacaggcaccccggcttggcgctgtctctccccctcggctcggagaggcccttcggcctgagggagcctcgccgcccgtccccggcacacgcgcagccccggcctctcggcctctgccggagaaacagcgatggcccaatggaatcagctacagcagcttgacacacggtacctggagcagctccatcagctctacagtgacagcttcccaatggagctgcggcagtttctggccccttggattgagagtcaagattgggcatatgcggccagcaaagaatcacatgccactttggtgtttcataatctcctgggagagattgaccagcagtatagccgcttcctgcaagagtcgaatgttctctatcagcacaatctacgaagaatcaagcagtttcttcagagcaggtatcttgagaagccaatggagattgcccggattgtggcccggtgcctgtgggaagaatcacgccttctacagactgcagccactgcggcccagcaagggggccaggccaaccaccccacagcagccgtggtgacggagaagcagcagatgctggagcagcaccttcaggatgtccggaagagagtgcaggatctagaacagaaaatgaaagtggtagagaatctccaggatgactttgatttcaactataaaaccctcaagagtcaaggagacatgcaagatctgaatggaaacaaccagtcagtgaccaggcagaagatgcagcagctggaacagatgctcactgcgctggaccagatgcggagaagcatcgtgagtgagctggcggggcttttgtcagcgatggagtacgtgcagaaaactctcacggacgaggagctggctgactggaagaggcggcaacagattgcctgcattggaggcccgcccaacatctgcctagatcggctagaaaactggataacgtcattagcagaatctcaacttcagacccgtcaacaaattaagaaactggaggagttgcagcaaaaagtttcctacaaaggggaccccattgtacagcaccggccgatgctggaggagagaatcgtggagctgtttagaaacttaatgaaaagtgcctttgtggtggagcggcagccctgcatgcccatgcatcctgaccggcccctcgtcatcaagaccggcgtccagttcactactaaagtcaggttgctggtcaaattccctgagttgaattatcagcttaaaattaaagtgtgcattgacaaagactctggggacgttgcagctctcagaggatcccggaaatttaacattctgggcacaaacacaaaagtgatgaacatggaagaatccaacaacggcagcctctctgcagaattcaaacacttgaccctgagggagcagagatgtgggaatgggggccgagccaattgtgatgcttccctgattgtgactgaggagctgcacctgatcacctttgagaccgaggtgtatcaccaaggcctcaagattgacctagagacccactccttgccagttgtggtgatctccaacatctgtcagatgccaaatgcctgggcgtccatcctgtggtacaacatgctgaccaacaatcccaagaatgtaaacttttttaccaagcccccaattggaacctgggatcaagtggccgaggtcctgagctggcagttctcctccaccaccaagcgaggactgagcatcgagcagctgactacactggcagagaaactcttgggacctggtgtgaattattcagggtgtcagatcacatgggctaaattttgcaaagaaaacatggctggcaagggcttctccttctgggtctggctggacaatatcattgaccttgtgaaaaagtacatcctggccctttggaacgaagggtacatcatgggctttatcagtaaggagcgggagcgggccatcttgagcactaagcctccaggcaccttcctgctaagattcagtgaaagcagcaaagaaggaggcgtcactttcacttgggtggagaaggacatcagcggtaagacccagatccagtccgtggaaccatacacaaagcagcagctgaacaacatgtcatttgctgaaatcatcatgggctataagatcatggatgctaccaatatcctggtgtctccactggtctatctctatcctgacattcccaaggaggaggcattcggaaagtattgtcggccagagagccaggagcatcctgaagctgacccaggtagcgctgccccatacctgaagaccaagtttatctgtgtgacaccaacgacctgcagcaataccattgacctgccgatgtccccccgcactttagattcattgatgcagtttggaaataatggtgaaggtgctgaaccctcagcaggagggcagtttgagtccctcacctttgacatggagttgacctcggagtgcgctacctcccccatgtgaggagctgagaacggaagctgcagaaagatacgactgaggcgcctacctgcattctgccacccctcacacagccaaaccccagatcatctgaaactactaactttgtggttccagattttttttaatctcctacttctgctatctttgagcaatctgggcacttttaaaaatagagaaatgagtgaatgtgggtgatctgcttttatctaaatgcaaataaggatgtgttctctgagacccatgatcaggggatgtggcggggggtggctagagggagaaaaaggaaatgtcttgtgttgttttgttcccctgccctcctttctcagcagctttttgttattgttgttgttgttcttagacaagtgcctcctggtgcctgcggcatccttctgcctgtttctgtaagcaaatgccacaggccacctatagctacatactcctggcattgcactttttaaccttgctgacatccaaatagaagataggactatctaagccctaggtttctttttaaattaagaaataataacaattaaagggcaaaaaacactgtatcagcatagcctttctgtatttaagaaacttaagcagccgggcatggtggctcasggctaaaaatccccggcatttggggggcccgggggggttc

SEQ ID NO: 338 - DNA, 1015 bp, Homo sapiens
  misc feature (958): n equals a,t,g, or c
ggtttctctccctgttgtccctgcctctttttccttcccgccgtgccccgcggccgggccggggcagccgggaagcgggtggggtggtgtgttacccagtagctcctgggacatcgctcgggtacgctccacgccgtcgcagccactgctgtggtcgccggtcggccgaggggccgcgatactggttgcccgcggtgtaagcagaattcgacgtgtatcgctgccgtcaagatggaggggcctttgtccgtgttcggtgaccgcagcactggggaaacgatccgctcccaaaacggatgtaaccattactaacgatggtgcaaccatcctgaagttactggaggtagaacatcctgcagctaaagttctttgtgagctggctgatctgcaagacaaagaagttggagatggaactacttcagtggttattattgcagcagaactcctaaaaaatgcagatgaattagtcaaacagaaaattcatcccacatcagttattagtggctatcgacttgcttgcaaggaagcagtgcgttatatcaatgaaaacctaattgttaacacagatgaactgggaagagattgcctgattaatgctgctaagacatccatgtcttccaaaatcattggaataaatggtgatttctttgctaacatggtagtagatgctgtacttgctattaaatacacagacataagaggccagccacgctatccagtcaactctgttaatattttgaaagcccatgggagaagtcaaatggagagtatgctcatcagtggctatgcactcaactgtgtggtgggatcccagggcatgcccaagagaatcgtaaatgcaaaaattgcttgccttgacttcagcctgcaaaaaacaaaaatgaagcttggtgtacaggtggtcattacmgaccctgaaaaactggaccaaattagacwgagcaactattctgtcaancctgggccaatttggaaggtgaagaaacttttgaagtgcaatgttgggacaggcaga

SEQ ID NO: 339 - DNA, 2088 bp, Homo sapiens
cccccccccttttttttttttttttttttttttttttttttttytttttttaaaattttatttaaaaaaccttcggtgcaatattaaaaagcaatacagccagctggagcgacaatcaacagaaagaaaagagggaggagagaaaaggggaaggggaagaggaagaagagtgaaacaaagccagagaaaagcagtttctaagtcatattaaaaggactatttctctaaaactcaaaaaaaaaaaaaaaactcawgatagtaaaagcacctagtgtgatagattatcggttaggtcatttgtgggttgattcttcagaaacagcagttgatacctagcagcgttattgatgggcattaatctatgttagttggcaccttaagatactagtgcagctagatttcatttagggaaatcaccagtaacttgactgaccaattgattttagagagaaagtaaccaaaccaaatatttatctgggcaaagtcataaattctccacttgaatgcgctcatgaaaaataaggccaaaacaagagttctgggccacagctcagcccagagggttcctggggatgggaggcctctctctccccaccccctgactctagagaactgggttttctcccagtactccagcaattcatttctgaaagcagttgagccactttattccaaagtacactgcagatgttcaaactctccatttctctttccccttccacctgccagttttgctgactctcaacttgtcatgagtgtaagcattaaggacattatgcttcttcgattctgaagacaggtccctgctcatggatgactctggcttccttaggaaaatatttttcttccaaaatcagtaggaaatctaaacttatcccctctttgcagatgtctagcagcttcagacatttggttaagaacccatgggaaaaaaaaaaatccttgctaatgtggtttcctttgtaaaccaggattcttatttgtgctgttatagaatatcagctctgaacgtgtggtaaagatttttgtgtttgaatataggagaaatcagtttgctgaaaagttagtcttaattatctattggccacgatgaaacagatttcaactgataaagagctggagaactccatgtactttggaatctcctccaagatagccagagtttaatacatcttcattctcaacactctccaaagaacttgacctaccttatgggttccatatttttcttcttaaatgtgcatcaatcatgccttgcccccaacctttaaatatattcttagacctggtaaatgcactcagacttgcgtctttaggaatttttaactttctttcactacattggcacttaaattttttctttataaagctttttgaaggtcataaacaaagaccataattgatgatagacctaatacatttcctctgtgtgtgtgtgtaacattccaaatactttttttttcttttccactgtttgtaaggtgcaacaatttaatatttttaagggactttttaagagttccttaagaaccaatttaaaattacttcagtgcaatcctacacagtatcaacattagaattttgatattagtcttatgttatcttccattctatttttatctgctttttgctgctagtttcaaactgccagtatttttccttttgcttttaaaatagttacaatatttttcatgatagccacagtattgccacagtttattataataaagggtttttatttgatttagcgcattcaaagcttttttctatcacttttgtgttcagaatataacctttgtgtgcgtgtatgttgtgtgtgtgcatgtgtggcgtatatgtgtgttacaggttaatgccttcttggaattgtgttaatgttctcttggtttattatgccatcagaatggtaaatgagaacactacaactgtagtcagctcacaatttttaaataaaggataccacagtgcatgctgtttgttcaatctttgcagacttctctttctttccatgctaccagttgtaaaggacacagctatatccttcatattgaagaatttgttatcaggaaactaccagtcctgctttac

SEQ ID NO: 340 - DNA, 3124 bp, Homo sapiens
aattcggcagagccattgcgagggtgacaggaaaccctgtgcagggagcgccgccatcttggaccagcccgaggaagatactgagggagcacaggagcagtcaccgctgccactgctactgccgctactgctgccggcgcgtctgcacctctcggcctgccagtgtacctgccggcgcctcggtcgaccgcccccgccccctctcccgctgcgtccgcactcctgttcctggtcctgacgcccccctcccgcccggaaagctgcccagccaccagcaaccccccagtgccaccatggcaactgcaccatacaactactcttacatctttaaatatattattattggggacatgggagtaggaaaatcttgcttgcttcatcaatttacagaaaaaaaatttatggctgattgtcctcacacaattggtgttgaatttggtacaagaataatcgaagttagtggccaaaaaataaaactgcagatttgggatacggcaggacaggagcgatttagggctgttacacggagctactacagaggagctgcgggagctcttatggtctatgatatcactagaagaagtacatataaccacttaagcagctggttgacagatgcaaggaatctcaccaatccaaatactgtaataattctcataggaaataaagcagatttggaggcacagagagatgttacatatgaagaagccaaacagtttgctgaagaaaatggcttattgttcctcgaagcgagtgcaaaaacgggagagaatgtagaagatgccttccttgaggctgccaagaaaatctatcagaacattcaggatggaagcttggatctgaatgctgctgagtctggtgtacaacacaaaccttcagccccgcagggaggccggctaaccagtgaaccccaaccccagagagaaggctgtggctgctagtgacctctttgctgtggcccctcatttgacctttcacctctgtctgttggaagcagtactttttactgcctcattgtcttctgtacatcttactgggtttaattaaaaaaaaagaaaaaactctgttgtaaaaacagtttaacacaatactaaactgctaaacaactagatgtaatcaggttatcaaaggcaagtagagtaataaatctctcctgcatggtaaatctagactttttttcccccttgtcctcgtgataagtatgtcaccaatatatgatttaaaccgagcactgatgctggacttcatgatttttaccctccctttggcaaggctttgtctcaytgtacggtttaatttggtgatatcttaagcctttcttcccatccttaactgttcaagtatgtctgttgtaaccaataagtttattgctgtgaaattacttctgatggtagagaaggggttctataactgcttttgttttgttttggataaatttcctgttgtgtgggtggcatttttcttaacgagatttgcttctgtcttagcctcacacagggaaaatatccatttatcttctctctcgtgcttaattaatagctttatctttttttataccattttatccttttctctttaacagaaagtaaatatgtataaaatttgaaggaatcgaactaacaatacattctgtgtatattattttaatgaagaaaataaattgattactggcattggaacagtataaaataccagtttgtacagtatgacctatatgtgaccatgttactcccttccatttcacacaaagaaatagacacaactgcagttcacaagtagtactggctccaccccttggtgctggcagtgtttggggacattatgctggaaagagctcctagcatcagaggattaacactagcagattctgttccatctttgcactgttgcttacctgctgattttcttaactgttcttgtgcaatcgacaatgtgctaacctgcttttctctttttgtaaacgtttttgcattacaggctgcattcttgccttactgtatagaaaaagaaaaaaggctgggtttactattgcacattttaagcttttatacctttatcttcttggaatggtcagattctgaactggacagtcagaaccacaggtctgctgttaagggattttaaattgtgcatttttaaccctacagtgaaataacttaagatatccctgtgttcacagtgtgaggggctgttttatgtcatgttggcataaattgttttgtaaaagggaaagtgtttctaaaggtgtttcagcgcttgtgctgatacaaagtaagttattactttgcaccaggtggtttggccactgaattaatactgtatagcaagagaaacaatcttatttttttggacaacatgttttattaagttcttcatttctgttgattttttttattgcatttatgattcagtggctgggaattgagaatttatttgaaatagaataggtaacacctcagcgtactatagaaaatgcactcagctcaactgctgtgtttaaaatacacattttaaatccctctttacagacactaacataaaagtacatctttctgggttgtaaacatgtggtagtaccagagtattgtatagtcaatgttaaataaaagccaaaactggaatgtgcagaaagtaggctttggttaatttgtggattcatttttatttttgtctttgtttaactttttaaaaaataagatttctggagtagattggtatattctgttaaagacttacagtgatccattttgcttacactgttgcatcacaagggactcacccagggaccatgacctgctggtgtgtgtgtatatttacaaaaacaaaacaaacaaaccacccattgggatataaggtagcaatcacaaactaaagactgcggcttgttgaggtgcaataccctgactcccaaagttagttacagtgggttttattgtttttgtgactgaaggatttattcagactgctgtactcttcatttgatgtaacaaaatgctattaatctaaatatttgtaaataaagtacctgtatctagattaaattaaaaaaaaaaaaaaaaaaaaaaaaaaaaaaaaaaaaaaaaaaaaaaaaaaaaaaaaaaaaaaaaaaaaaaaaaaaaaaaaa

SEQ ID NO: 341 - DNA, 245 bp, Homo sapiens
  misc feature (240): n equals a,t,g, or c
cgaggaccggccttgcgagcggcgmcgactataaaatggcgcgtgctgcaacccgcgcccgcttcggagagagaaatgctggggtgcagcttcaagcttaggaccacccaccatgcctatccaggtgctgaagggcctgaccatcactcattaagaacagaggaggctgcctgttactcctggtgttgcatccctccagacwctctgctgtttcctggctaggcgtggctgcagcatggnctagg

SEQ ID NO: 342 - DNA, 5668 bp, Homo sapiens
  misc feature (2482): n equals a,t,g, or c
gcggcgcgaggcgtctggctcttcgcggcggcggcgaggggaaagggagcgcgggggctgggtggaatcgaggagtgaggaaaaagggaaggggcgggggagagggaccagggaaggcgtcggggggaatctcgcgagggttggagttttggcgagagtttgtggaagatggcgcctgttgtgacagggaaatttggtgagcggcctccacctaaacgacttactagggaagctatgcgaaattatttaaaagagcgaggggatcaaacagtacttattcttcatgcaaaagttgcacagaagtcatatggaaatgaaaaaaggtttttttgcccacctccttgtgtatatcttatgggcagcggatggaagaaaaaaaaagaacaaatggaacgcgatggttgttctgaacaagagtctcaaccgtgtgcatttattgggataggaaatagtgaccaagaaatgcagcagctaaacttggaaggaaagaactattgcacagccaaaacattgtatatatctgactcagacaagcgaaagcacttcatgttgtctgtaaagatgttctatggcaacagtgatgacattggtgtgttcctcagcaagcggataaaagtcatctccaaaccttccaaaaagaagcagtcattgaaaaatgctgacttatgcattgcctcaggaacaaaggtggctctgtttaatcgactacgatcccagacagttagtaccagatacttgcatgtagaaggaggtaattttcatgccagttcacagcagtggggagccttttttattcatctcttggatgatgatgaatcagaaggagaagaattcacagtccgagatggctacatccattatggacaaacagtcaaacttgtgtgctcagttactggcatggcactcccaagattgataattaggaaagttgataagcagaccgcattattggatgcagatgatcctgtgtcacaactccataaatgtgcattttaccttaaggatacagaaagaatgtatttgtgcctttctcaagaaagaataattcaatttcaggccactccatgtccaaaagaaccaaataaagagatgataaatgatggcgcttcctggacaatcattagcacagataaggcagagtatacattttatgagggaatgggccctgtccttgccccagtcactcctgtgcctgtggtagagagccttcagttgaatggcggtggggacgtagcaatgcttgaacttacaggacagaatttcactccaaatttacgagtgtggtttggggatgtagaagctgaaactatgtacaggtgtggagagagtatgctctgtgtcgtcccagacatttctgcattccgagaaggttggagatgggtccggcaaccagtccaggttccagtaactttggtccgaaatgatggaatcatttattccaccagccttacctttacctacacaccagaaccagggccgcggccacattgcagtgcagcaggagcaatccttcgagccaattcaagccaggtgccccctaacgaatcaaacacaaacagcgagggaagttacacaaacgccagcacaaattcaaccagtgtcacatcatctacagccacagtggtatcctaactaccgtctttttgctaggacttaaactgacttgagtgtggcaaaaagttaacaaaaaaggagaaaaaatgaacaatcgtttgtggtttcttgggaaaacttttcataccaggtgatactattcaaaaaccccgttgtctccctgcaagtgctgatttgaaatgcagaagccacagtaaaaaaaaaaaaaaaaaaaaaaaaaaagaaaaaaaaatcaaaatgtataaatattggaaatcaagtttttcagctgttttgttggttggttggttggtttttgtttggttttgtttaaatgggcaagaagtaaataatgtggctggaatacaagttgaacaaactagaagacacaaatctaacatagtttttatggaccaaggaacttgtatattgtataagctttagtaaaaggtacattttcaccatacctttttttatatcacggtattatagtacaccttgttaccaaataggttgttctctttccccacccacctttgagcttttgctctaaaatacattcaggttccaagcctgaccatccttgtttaatctatcatactcttccaggttttttttttttggtctaaggctggaacttttttcttttttttcagctgaagtcttatgacttttcatgagtcaaaattgtttggatttcagcaagtcaaatcttgcaaaggcctgcatattttttttaagattatatgaagtctgtgcaaaagctttaaaaaaatgcctctgccttgcctgcaatacatgcaatgtatgttaacttagtctctcttctcagacactgttggtagttatttctgtgttttccttttttttaaaaaaaaatatggacttnattgtggttatctgagaggttctaacattcacatgcaatttggtgtggccatttagctattaatgagttaatggcgcagaacttgttgatatttgaagtgttctctccccttttcccatgacgtaaatacataggtgtgttccaggatttgttcaggtttttcccccctcctaatcttgtacataacttgtattatgtgtaagttaaacattttattttgaacttggaatgttcccagtgatttcattcagcagggtattttctgccttgttggcaagtgacaaaaaatatgggaagtatttgctaccagttggtagatggtgcccttaatggtagaatgaggaaaatgtccgcaaaagcatgttttattatctttacttttttggggggttggagggggtagcctagccagaacatcattgtaatcttaaaacataagatgcttttattagatgatcaactaaaatagctggaagacagtactttagaaacagatagttgtaagattataaaatgcaaatgtaacttatgttttcatttttttctctgccttttttgtttgtttgttttctcttttccagtactgagcatctccacaaatgtctcctaactcagaaaatgtttcttttcttttcagttgagatttggttgcattcagggttgtaggttggccttgcttgctaaccccgccggttttaccgtgctttcattcctgaactttgtttatgcctttgtttggtttcttcgaaattgcagcagactcattgggctacatttagtacaggaaccacgtgtgtaatgttatacaacacagtctagtaatacaatcatccctcttagagtaaaaactacctctagattgtggtaagcttttactgtcccataaaacaggagccacagtaccttatgaatgcaaaactgtaacttcctacagtgtttccctacagaacattgtctttctggtgtcctgggctgttttgaaaaagtttccattaatagactttttagaaattattattagtagcattttttttccagctttgctgtcttcatcactcactctatgctcagactatgccactgtaaatattcttcctaacatctttaaatcgccttttcctcagttttcaaggggaaggtcatttgtaaagcacgttaggtggttaaatcagttattgcggttttctcttactgcaagcctttttaatcacccccaggctgcattttattctatatcgccttttttcttcaaatctgctccaatcactcacttctctcttataagctaatcctgcctcacaccttaaatctgtttcagtgatcaagggcagaactcattgtggccttatctttctttgttgtaattgttcactgtctctttcttacagaccacttatttctgagtagtagttattcctctctatggagtcatggcaggaatcattacacagtgcttttgttcagagcatggacatgttcctagtgctgctttgctttaacggccacaagtttcctccacttcctaggtttggtatttagttaaggaatcatattaaattaaccaataacaaaagagatacttttgaagaacaaactattccttacccatttttgtagctcaaaaataatttttcaagttcatgaccttattaaaatgaacttgtgtttttttaacaaacgtgtatgttttattttgatagtttctttccgtaagataattgaaatattatactgtaaacccttttcttttctttttttgaaaagtccaagaatgtacttatacaggcatttttccccacctatttttggccattctcataccacagactaaagagtgaaatgatttgtccattgtagcttattgtttatcagtagttcttttgtcagctgcttacattttttctttcatggttttgtgaatcattttcagtatgtaatttataggaaccttgtcctctggttatagtagactgtgtgccctcctccagtgatggcattattagacatgctggtcatttaccctcagaaagactctcttattagaatggtgagtgcttcagttatagtatgtttgaatttttaaaaaattctgttttagaaatgtatcttatgctctcatgactatgcagtttctaaacatacacatagaagctgagtctctgatccaatatgtttttatttgttccatttaatttatcacatagattgggaaggcaagctaaaagccttaaaaatgccctttatattttgagtgatttcagcgttgaacactagtatactatctaaatttgctgctcactttctttaaactgtggcaattaaaggcatgtttatacatgacttaatcgtgaaatgtttgtcactcttactgcacagacttatctgcaatcataactggttagtttttttgttttgttttgttttattgtttttaatgaaactggtaccatctgtgctttcacaaaaaacttccaatgccatttttgagaactaacctaactagtcatgctaaccagaaaatccactggggaggaggttccttttgaaacaaaatgctgttcagttagtaaccaagttactttgattgcaaaagcagctgtgtttctgataagtactgaacaaatgtgtgtaattttctgtgccagacttatgactttgttttcaagcactgtaatgtgggatggatggttagaaacaataatatattagggtttctgtttaaccctttcaggactgaactgtatctccttttgttaattttcccctgtgttgtgataaatgtttgccagcattcagtactgtgttggtccagatgtaggtttatatgctcatttttagcttatttcttgtaccttgcagcatgctctacgcattcagtccttaaggggtttattttacaaactgtgcgcctgtaaggtttattagcaataagatagaaaattgagcaagtttataccataattttgtagaaaaaaagaatctgctcagttccatatttcatccgtgaaaaacttgcaatacgagcagtttcaaggaataaataaaaaggaaatgtaaaccattgtaaaagtcttctgtcgaatgtgcctgatgcatgtattatcgtcttttatttcagaatacttcataaagataaaattaaattctaaaaaaaaaaaaaaaaaaaaaaaaaaaaaaaaaaaaagc

SEQ ID NO: 343 - DNA, 814 bp, Homo sapiens
  misc feature (659): n equals a,t,g, or c
  misc feature (660): n equals a,t,g, or c
  misc feature (814): n equals a,t,g, or c
ggcacgargtaaccgagactatcaggatccggagacggaaatgtccgaagccgcagtacttgaccctgtattttgggagtcgaacggagaatggaaactgaaagtggaaatcaggaaaaggtaatggaagaagaaagcactgaaaagaaaaaagaagttgaaaaaaagaaacggtcacgagttaaacaggtgcttgcagatattgctaagcaagtggacttctggtttggggatgcaaatcttcacaaggatagatttcttcgagaacagatagaaaaatctagagatggatatgttgatatatcactacttgtgtcttttaacaaaatgaaaaaattgactactgatgggaagttaattgccagagcattgagaagttcagctgttgtagagcttgatttggaaggcaccagaatccggagraaaaamcctctgggggaaagaccaaaggatgaggatgaacgcacagtgtatgtggagttacttcccaaaaatgttaatcacagctggattgaaagagtatttgggaaatgtggcaatgttgtttatataagtataccacattataagtctactggagatccaaagggatttgcgtttgtggaatttgaaacaaaagaacaagcagcaaaagcaattgaggtaagtccagatcctannaaaaaaaaaagaaagaaaagaaaacaagtattaaaatagtaacttttgcaatcatttcagtttcttaacaacccaccagaaagaaagcaccaagaaaaacctggcatatttccctaaaacagtggaaaaaataagcccattccccaggcccccn

SEQ ID NO: 344 - DNA, 901 bp, Homo sapiens
  misc feature (15): n equals a,t,g, or c
  misc feature (83): n equals a,t,g, or c
  misc feature (764): n equals a,t,g, or c
  misc feature (852): n equals a,t,g, or c
  misc feature (858): n equals a,t,g, or c
gcggacgcgtggggntgaaacaccaaaaatataaggaaaataacacagcagaggagtagctgggaccatcacactgttcaggntgagctattcctctgcwgtgtkatkktcccagctactacatcagatgcggtttttttgctcccttatgttcttcggatatggttatggcatttgtaggcttggaggtaaagaactgaagataactggtgctggatagaggagccttattttttattatggcagcttgctatttttataacatggtgattgagttgaacacaatcaaagtacagtagtaactgatgtccccttcttcctggatgaatgagcagataaatattgatgtcagcatccttgaaccatatcaaagtgagcagtgtttggctactgcttctatttgaaatggtgctgtgttttggttgtggtctgaagctttgaagcgctacttagcatctcctttcttccatggagctctcacgattcaaacatgacagatttggtaaaatgctggttaggttgagtcttccttgcccccactcagtcatctttgtatgaatcccatgatttgggggtttttttctttttttttttataccagtttttagctggtgtttatgaagaacagtgagtacctagaactgtgccactaattaaaggaaatcctaagaaggtgcatttctttacagagctgtgtcatgccatcctttgggccctctgctggaaaagtagaatcaagtctcaaataatgcctttttaattgnatcctctagtattatagatataggacagtactgtatcatacctctgtgaatgtaaaatatcttgacctgctttatgatacgtagtagngaccgngtttatcagagctggttttaatgatggtattctagaatggttt

SEQ ID NO: 345 - DNA, 2588 bp, Homo sapiens
  misc feature (2551): n equals a,t,g, or c
  misc feature (2564): n equals a,t,g, or c
gaatgatttgacttatgatatggagatccttcaacccttgcttgagcagggagcatcactcagacagacaatgacatatgaacaaccaaaggaagcaatagtgataaggaaaaagatagaaaatctgactagtgctgtcaatagtctaaattttattatcaaagaacttacaaaaagacacaacttacttagaaatgaagtacagggtcgtgatgatgccttagaaagacgtatcaatgaatatgccttagaaatggaagatggcctcaataagacaatgactattatwaataatgctattgatttcattcaagataactatgccctaaaagagactttaagtactattaaggataatagtgagatccatcataaatgtacctccgatatggaaactattttgacatttattcctcagttccaccgtctgaatgattctattcagactttggtcaatgacaatcagagatataactttgttttgcaagtcgccaagacccttgcaggtattcccagagatgagaaactaaatcagtccaacttccaaaagatgtatcaaatgttcaatgaaaccacttcccaagtgagaaaataccagcaaaatatgagtcatttggaagaaaaactactcttaactaccaagatttccaaaaattttgagactcggttgcaagacattgagtctaaagttacccagacgctcataccttattatatttcagttaaaaaaggcagtgtagttacaaatgagagagatcaggctcttcaactgcaagtattaaattccagatttaaggcgttggaagcaaaatctatccatctttcaattaacttcttttcgcttaacaaaactctccacgaagttttaacaatgtgtcacaatgcttctacaagtgtgtcagaactgaatgctaccatccctaagtggataaaacattccctgccagatattcaacttcttcagaaaggtctaacagaatttgtggaaccaataattcaaataaaaactcaagctgccctatctaatttaacttgttgtatagatcgatcgttgcctggtagtctggcaaatgttgtcaagtctcagaagcaagtaaaatcattgccaaagaaaattaacgcacttaagaaaccaacggtaaatcttaccacagtcctgataggccggactcaaagaaacacggacaacataatatatcctgaggagtattcaagctgtagtcggcatccgtgccaaaatgggggcacgtgcataaatggaagaactagctttacctgtgcctgcagacatccttttactggtgacaactgcactatcaagcttgtggaagaaaatgctttastccagatttttccaaaggatcttacagatatgcacccatggtggcattttttgcatctcatacgtatggaatgactatacctggtcctatcctgtttaataacttggatgtcaattatggagcttcatataccccaagaactggaaaatttagaattccgtatcttggagtatatgttttcaagtacaccatcgagtcatttagtgctcatatttctggatttttagtggttgatggaatagacaagcttgcatttgagtctgaaaatattaacagtgaaatacactgtgatagggttttaactggggatgccttattagaattaaattatgggcaggaagtctggttacgacttgcaaaaggaacaattccagccaagtttccccctgttactacatttagtggctatttattatatcgtacataagttagtatgaaaaacagactatcacctttattgagaaacagccagtgttttcatttatctttgcttgcacatctgctctgttttggtttttctacaggaaatgaaaatcaacttgtttttttaatatgagtaaacttgtatgtctattttataaaattatttgaatattgtttaatgtctgaatatgaaagagttcttgatcctaaagaaatttagtggcacagaaaacaaagtgaatttgttagcataattattcctattcttatttcttcattttaagtcattgcaatggaaagtaatattataaaatggtaattacaacatattatcagtcacagttttctttccaattaaacacttaacttttgttattccctgtatataaatatataacacacattttctagattcacaaatttaaataaattactcaaaaaatgaaaattgattttgtaaacttttatttttactctttacgttgagttgatcaattttccatactaagattttcattcagaatcaaaattaagaaagttggactgaaaatatgaaaaatgcttaactattgttctcttcctataattctctaattataacatagtaatttacatgtagttggacatgtacactcaagtctaagaatatatgagtggatcatttaccgccccccgccccacaacatctataaggggcaaaaagtctttttctaataagtattcttcyatggtagtacctacagatctgcccttcttcttctaaagggtaagtcataatctgtgtnatactacaatttnggggatgcccactaggccccgttt

SEQ ID NO: 346 - DNA, 3770 bp, Homo sapiens
  misc feature (375): n equals a,t,g, or c
  misc feature (380): n equals a,t,g, or c
ggcatggcgtccatggcggcggcgatcgcggcttcgcgctcggcggtcatgagcgggaaccggcctctggacgaccgggagcgaaagygcttcacttacttctcgtcgctgagccccatggccaggaagatcatgcaggacaaggagaagatccgcgagaagtacgggcccgagtgggcgcggctgccgcccgcgcasaggacgagatcatcgaccggtgcctggtggggccgcgcgccccggcgccccgagaccccggggactcggaggagctcacgcgcttccccggcttgcgcgggcccacgggccagaaggtggtgcgcttcggggacgaggatctaacttggcaagatgagcactctgcccctttctccntgggnaaacaaagartcagattggagttcartatctccgccctatccatccaggagccgagcaacggcaccgcsctcagcragcccagaccactgtccaaagcttcccagggctcccaggccctcaagtcctcccaaggcagcaggtcctccagcctggacgccctgggccccaccaggaaggaggaggaagcgtcattctggaagatcaatgctgagcggtcccgaggggaggggcctgaggccgagttccagtcgctgacccctagccagatcaagtccatggagaagggggaaaaggtcttgcctccctgctaccggcaggaacctgccccgaaggacagggaggccaaggtggaaaggcccagcaccctccgtcaggagcagcgtcctcttcccaacgtgagcaccgaacgtgagagaccccagcctgtccaggccttcagcagtgcactgcacgaggctgccccctcccagctcgaggggaagctgccatctcctgatgtcaggcaggacgatggggaagacaccctgttctcggaacccaagtttgcacaggtcarctcaagtaatgtcgtcttgmagacgggatttgattttctggacaattggtaaaatgtattagaaaaatacmatgaagaaccctaaaatgktttccaaagtggtgtggtggargasgatwaaaagggccaccttttcctatgkattttactggkttcttgacactcttttcttaatcatttggaaactggtcaataytgccagatttttttcttttttggtagaaccagatatatatgctattttcagtgatttgataacagaagttttccatttggaatttttaaggtctgttaataattcaggagatcttgtaaataaaacttctgttcccagctccacccaactttccccctcctcaaaggatgtgtttcaaccatgtcacaaaaatcatataagtgatttccatctccttctccattattccccctcccccctccgctttttaccgtatgggttccttttggtgggtgattgagggtgatgttatcagccatgacatcagcatgctggctgtgaccccggaaagactggcccccagcgacgttctcagccagcgctcgcagctgtccggggcttctctggcagaagccatgtctctcacatcatgtgccagcctccaccctcacgccatttccagggaacagactgcgggtatgtagcagtgtagtctttaacctgctctgatacatattcagagtatggattgttgtttaaaaagagttgcatgtttaaagagttttgtactagcttttcattattttgtatctagattatcaacaatggggctaccactttccttggttttatatccatttcctcttggaagttcttgttgcttatgtgacctgttggttgttccccggactgggcacctgcaggagtcagggcagacggcagatgtggctggaggtcagggctcttctgcttagttgtgttagastcttccagcatgggactgatgggagcagtgggcattctttatcccaagggctagccaggttgcgtcatgacggaccttccccagccctgaccaccaccagaagtggaagagtggagtttgcggtcaactcagcagtgcccatggagacctgcgtggtgtcagagcagcagtatctcttggagctggtgcagacaccaaggctgcccagtggtacaacgtggtccacctcccctagggaagctgctgcactcagaggctgtcctgcccagtggcccctgagccgtgtgagcctgcaggaggcgtctgagcagagcctcaagcccggtatggcgccatctccatgttgccatcactgcgttctcacctgaagccttaatctytgcgacacctgccagtgagcgctcggtttcaataccaaagtgtgtcttcttctttttttttttttttaaatgcctgtttcataggaccttctgaaatgatttccagaatattttatctggctccaaaataaagcacatagcaactcacctcaacccctcatcatctccaggaaagtttctgccaaagctgtggcatagccaacttttgatttggttcttgccaattgttttatgtccctaaacctcatttggatccttggggtatagttttatctttctgcttcagtgatttactgtaacttttcaaatattggttctttctgtaccatttaagtatagttgatatatgtgaggcaaaaaaaggtttcagcatggtggtgagggaaaaaggagcttagaaatcccagttggcacagcctgggcaagcgccastcccctcagggctaacggcactgttcacacagggatcctcagaatcagcggccacctgcctccaccttctgcctggaggcatggggctgttgtagaacctatggtagcaaatgtatatgtatgagtttgtattctgtagtgttggtgtagcacagaagaaagacctgtgtcctagagagtaggccaaggtgatctgcctcttctattgggagaaattctaatttctttcccactttctcaacaagcccaatattccctccaagttcttcttggtgctgagggctgtaggaattattgaaagcttctgcctcacttagtatcgtctggggcccagcacccagcaataactctaataatgtttcttaatggtatagcctcctgagattaaatgtaaaatcaaaaattaggaaatcttggagggagtcctcaagttgtattgctttgctgtgcttttggaagaagggacgacctggaggacacaggctcatgtgtgggtcttcatcctgcctgaccggcagatcttcctctacaccttgggcaaagtctatgcgaagatggtttcttagctctccatttgccatgattttcctcccattcatcatgagggagtttctcaaaccaggagtttatatttattttttagaaaatacacacttttcaggagaaacctgagcatgattttggattctccacctccccccagtctctgcacctgggattcagctcaaggattcagtgtcttcatttttacaaaagttcccccaagaaatcagcaaccagcctctgtttcatctgggagcccctcccttggccccctgggtttgggggtgctgccctactgggaacagcgggggtctgtcacccgtctgagccgcacccccctgtgtggatttcaggaagagcctccctttctttgcgtctccctttctttaattaacattttcaaaagtaataaattcttactgacgacttgtaacttagtcatattttatacttgtagcctttaataaagccatttaaaaaaaaaaaaaaaaaaaaaaaaaaaaaaaaaaaaaaaaaaaaaaaaaaaaaaaactcgag

SEQ ID NO: 347 - DNA, 2358 bp, Homo sapiens
aggcggccgaggcgcgagcgcggcccggggtgacgctgcggcccttcgcgcccctctcgggggcggccgaggcggacgagggcggcggcgactggagcttsattgactgcgagatggaggaggtggacctgcaggacctgcccagcgccaccatcgcctgtcacctggacccgcgcgtgttcgtggacggcctgtgccgggccaaatttgagtccctctttaggacgtatgacaaggacatcacctttcagtattttaagagcttcaaacgagtcagaataaacttcagcaaccccttctccgcagcagatgccaggctccagctgcataagactgagtttctgggaaaggaaatgaagttatattttgctcagaccttacacataggaagctcacacctggctccgcaaatccagacaagcagtttctgatctcccctcccgcctctccgscagtgggatggaaacaagtggaagatgcgaccccagtcataaactatgatctcttatatgccatctccaagctggggccaggggaaaagtatgaattgcacgcagcgactgacaccactcccagcgtggtggtccatgtatgtragagtgatcaagagaaggaggaagaagaggaaatggaaagaatgaggagacctaagccaaaaattatccagaccaggaggccggagtacacgccgatccacctcagctgaactggcacgcgacgaggacgcattccaaatcatactcacgggaggaatcttttactgtggaggtggctggtcacgacttcttcggaggtggcagccgagatcggggtggcagaaatcccagttcatgttgctcagaagagaatcaaggcygtgtccccttgttctaatgctgcacaccagttactgttcatggcacccgggaatgacttgggccaatcactgagtttgtggtgatcgcacaaggacatttgggactgtcttgagaaaacagataatgatagtgttttgtacttgttcttttctggtaggttctgtctgtgccaagggcaggttgatcagtgagctcaggagagagcttcctgtttctaagtggcctgcaggggccactctctactggtaggaagaggtaccacaggaagccgcctagtgcagagaggttgtgaaaacagcagcaatgcaatgtggaaattgtagcgtttcctttcttccctcatgttctcatgtttgtgcatgtatattactgatttacaagactaacctttgttcgtatataaagttacaccgttgttgttttacatcttttgggaagccaggaaagcgtttggaaaacgtatcacctttcccagattctcggattctcgactctttgcaacagcacttgcttgcggaactcttcctggaatgcattcactcagcatccccaaccgtgcaacgtgtaacttgtgcttttgcaaaagaagttgatctgaaattcctctgtagaatttagcttatacaattcagagaatagcagtttcactgccaacttttagtgggtgagaaattttagtttaggtgtttgggatcggacctcagtttctgttgtttcttttatgtggtggtttctatacatgaatcatagccaaaaacttttttggaaactgttggttgagatagttggttcttttaccccacgaagacatcaagatacacttgtaaataaagctgatagcatatattcatacctgttgtacacttgggtgaaaagtatggcagtgggagactaagatgtattaacctacctgtgaatcatatgttgtaggaaaagctgttcccatgtctaacaggacttgaattcaaagcatgtcaagtggatagtagatctgtggcgatatgagagggatgcagtgcctttccccattcattcctgatggaattgttatactaggttaacatttgtaatttttttctagttgtaatgtgtatgtctggtaaataggtattatattttggccttacaataccgtaacaatgtttgtcattttgaaatacttaatgccaagtaacaatgcatgctttggaaatttggaagatggttttattctttgagaagcaaatatgtttgcattaaatgctttgattgttcatatcaagaaattgattgaacgttctcaaaccctgtttacggtacttggtaagagggagccggtttgggagagaccattgcatcgctgtccaagtgtttcttgttaagtgcttttaaactggagaggctaacctcaaaatattttttttaactgcattctataataaatgggcacagtatgctccttacagaaaaaaaaaaaaaaaaaaaaaaaaaaaaaaaaaaaaaaaaaaaaaggggggggggg

SEQ ID NO: 348 - DNA, 2044 bp, Homo sapiens
  misc feature (94): n equals a,t,g, or c
atttctatggctcccatttgtaatacaaggaaatgtcagcttctagttttgtaacgtcttgcccaagagctgcgaccgttaacttgtggagttnggacggcgtcaagtcaattggttgcccgacctttattctgccttgtcccatagatttagaaagaggctgacacatctggtaactagtttacggtcatctgcctctaagcgacatttagggtaagcgacatttttcagaaaccaaggccctccctctcgtctcactagtgggaagggtggaaagaacaggacagaaagctcttcctcttgtgtgaggcagttgctgtggaagccccataggcaggaggcccccgggcagcacatcctgtctgcttgtgtctgctgcagagttctgtccttgcattggtgcgcctcaggccaggctgcactgctgggacctgggccatgtctccccaccccaccgccctcctgggcctagtgctctgcctggcccagaccatccacacgcaggaggaagatctgcccagaccctccatctcggctgagccaggcaccgtgatccccctggggagccatgtgactttcgtgtgccggggcccggttggggttcaaacattccgcctggagagggagagtagatccacatacaatgatactgaagatgtgtctcaagctagtccatctgagtcagaggccagattccgcattgactcagtaagtgaaggaaatgccgggccttatcgctgcatctattataagccccctaaatggtctgagcagagtgactacctggagctgctggtgaaagaaacctctggaggcccggactccccggacacagagcccggctcctcagctggacccacgcagaggccgtcggacaacagtcacaatgagcatgcacctgcttcccaaggcctgaaagctgagcatctgtatattctcatcggggtctcagtggtcttcctcttctgtctcctcctcctggtcctcttctgcctccatcgccagaatcagataaagcaggggccccccagaagcaaggacgaggagcagaagccacagcagaggcctgacctggctgttgatgttctagagaggacagcagacaaggccacagtcaatggacttcctgagaaggacagagagacggacacctcggccctggctgcagggagttcccaggaggtgacgtatgctcagctggaccactgggccctcacacagaggacagcccgggctgtgtccccacagtccacaaagcccatggccgagtccatcacgtatgcagccgttgccagacactgaccccatacccacctggcctctgcacctgagggtagaaagtcactctaggaaaagcctgaagcagccatttggaaggcttcctgttggattcctcttcatctagaaagccagccaggcagctgtcctggagacaagagctggagactggaggtttctaaccagcatccagaaggttcgttagccaggtggtcccttctacaatcgagcagctccttggacagactgtttctcagttatttccagagacccagctacagttccctggctgtttctagagacccagctttattcacctgactgtttccagagacccagctaaagtcacctgcctgttctaaaggcccagctacagccaatcagccgatttcctgagcagtgatgccacctccaagcttgtcctaggtgtctgctgtgaacctccagtgaccccagagactttgctgtaattatctgccctgctgaccctaaagaccttcctagaagtcaagagctagccttgagactgtgctatacacacacagctgagagccaagcccagttctctgggttgtgctttactccacgcatcaataaataattttgaaggcctcacatctggcagccccaggcctggtcctgggtgcataggtctctcggacccactctctgccttcacagttgttcaaagctgagtgagggaaacaggacctacgaaaaaaaaaaaaaaaaaaatcgagggggggcccgtacccaatcgcctgta

SEQ ID NO: 349 - DNA, 793 bp, Homo sapiens
aattcggcaggagtgagtttccaagccccagctcactctgaccacttctctgcctgcccagcatcatgaagggccttgcagctgccctccttgtcctcgtctgcaccatggccctctgctcctgtgcacaagttggtaccaacaaagagctctgctgcctcgtctatacctcctggcagattccacaaaagttcatagttgactattctgaaaccagcccccagtgccccaagccaggtgtcatcctcctaaccaagagaggccggcagatctgtgctgaccccaataagaagtgggtccagaaatacatcagcgacctgaagctgaatgcctgaggggcctggaagctgcgagggcccagtgaacttggtgggcccaggagggaacaggagcctgagccagggcaatggccctgccaccctggaggccacctcttctaagagtcccatctgctatgcccagccacattaactaactttaatcttagtttatgcatcatatttcattttgaaattgatttctattgttgagctgcattatgaaattagtattttctctgacatctcatgacattgtctttatcatcctttcccctttcccttcaactcttcgtacattcaatgcatggatcaatcagtgtgattagctttctcagcagacattgtgccatatgtatcaaatgacaaatctttattgaatggttttgctcagcaccaccttttaatatattggcagtacttattatataaaaggtaaaccagcaaaaaaaaaaaaaaaaaaaaaaaaaaaaaaa

SEQ ID NO: 350 - DNA, 1058 bp, Homo sapiens
  misc feature (1033): n equals a,t,g, or c
  misc feature (1034): n equals a,t,g, or c
atcccccgggactgccaggattcggcacgagccacacctttgcccctgctgcgatgaccctgtcgccacttctgctgttcctgccaccgctgctgctgctgctggacgtccccacggcggcggtgcaggcgtcccctctgcaagcgttagacttctttgggaatgggccaccagttaactacaagacaggcaatctatacctgcgggggcccctgaagaagtccaatgcaccgcttgtcaatgtgaccctctactatgaagcactgtgcggtggctgccgagccttcctgatccgggagctcttcccaacatggctgttggtcatggagatcctcaatgtcacgctggtgccctacggaaacgcacaggaacaaaatgtcagtggcaggtgggagttcaagtgccagcatggagaagaggagtgcaaattcaacaaggtggaggcctgcgtgttggatgaacttgacatggagctagccttcctgaccattgtctgcatggaagagtttgaggacatggagagaagtctgccactatgcctgcagctctacgccccagggctgtcgccagacactatcatggagtgtgcaatgggggaccgcggcatgcagctcatgcacgccaacgcccagcggacagatgctctccagccaccrcacgagtatgtgccctgggtcaccgtcaatgggaaacccttggaagatcagacccagctccttacccttgtctgccagttgtaccagggcaagaagccggatgtctgcccttcctcaaccagctccctcaggagtgtttgcttcaagtgatggccggtgagctgcggagagctcatggaaggcgagtgggaacccggctgcctgcctttttttctgatccagaccctcggcacctgctacttaccaactggaaaattttatgcatcccatgaagcccagatacacaaaattccaccccatgatcaagaatcctgctccactaagaatggtgctaaagtaaaactagtttaataagcaaaaaaaaaaaaaaaaaatcnngggggggcccggtacccaattggc

SEQ ID NO: 351 - DNA, 1348 bp, Homo sapiens
  misc feature (12): n equals a,t,g, or c
  misc feature (24): n equals a,t,g, or c
  misc feature (36): n equals a,t,g, or c
  misc feature (1294): n equals a,t,g, or c
  misc feature (1307): n equals a,t,g, or c
  misc feature (1318): n equals a,t,g, or c
  misc feature (1329): n equals a,t,g, or c
tctgcaaaaacnattcagtgacangacacaagtcanactgacagtaccggtccggaattcccgggtcgacccacgcgtccgctgcctccactcggcctcagttcctcatcactgttcctgtgctcacagtcatcaattatagaccccacaacatgcgccctgaagacagaatgttccatatcagagctgtgatcttgagagccctctccttggctttcctgctgagtctccgaggagctggggccatcaaggcggaccatgtgtcaacttatgccgcgtttgtacagacgcatagaccaacaggggagtttatgtttgaatttgatgaagatgagatgttctatgtggatctggacaagaaggagaccgtctggcatctggaggagtttggccaagccttttcctttgaggctcagggcgggctggctaacattgctatattgaacaacaacttgaataccttgatccagcgttccaaccacactcaggccaccaacgatccccctgaggtgaccgtgtttcccaaggagcctgtggagctgggccagcccaacaccctcatctgccacattgacaagttcttcccaccagtgctcaacgtcacgtggctgtgcaacggggagctggtcactgagggtgtcgctgagagcctcttcctgcccagaacagattacagcttccacaagttccattacctgacctttgtgccctcagcagaggacttctatgactgcagggtggagcactggggcttggaccagccgctcctcaagcactgggaggcccaagagccaatccagatgcctgagacaacggagactgtgctctgtgccctgggcctggtgctgggcctagtcggcatcatcgtgggcaccgtcctcatcataaagtctctgcgttctggccatgacccccgggcccaggggaccctgtgaaatactgtaaaggtgacaaaatatctgaacagaagaggacttaggagagatctgaactccagctgccctacaaactccatctcagcttttcttctcacttcatgtgaaaactactccagtggctgactgaattgctgacccttcaagctctgtccttatccattacctcaaagcagtcattccttagtaaagtttccaacaaatagaaattaatgacactttggtagcactaatatggagattatcctttcattgagccttttatcctctgttctcctttgaagaacccctcactgtcaccttcccgagaataccctaagaccaataaatacttcagtatttcaraaaaaaaaaaaaanaagggsgggccgntctaaaggatncaagctttacntacccgtgcatgcgaacgt

SEQ ID NO: 352 - DNA, 3170 bp, Homo sapiens
  misc feature (3163): n equals a,t,g, or c
cacgctcttagaactagtggatcccccgggctgcaggaattcggcacagaatttgtcgggagccacgctgagtggcaagcaggaagagggacaggcatgcggggcgtgaccacagtggaggagacaggtggatgtggaaccacaggctgctcattcagcacctttgttgttactgtgaacgtgaatgtgggccagtatcaagagagtctctctgagtgactgcaccatggcactggcaccagggcgactattagccagggcagaccactagacttcagtgcagggacctggttttcccttcgtttgcactttagtaaattgggtgggaggtttccttttggatctgttttgagactgttccagaaagaaggcttcctttcccgagacacttccataggcagcaatttggtgattcatttgcagcaaaatackggcttgttaattattttcctgcccagcgcctgcgtgctaaacaacagatgagggtgagcgtaccacwgaagtctgaagatgtcgccattgaacggacagtgttttcatatgtttctaggttgtcttatgctacagtttccaagccagcccccacagtgaggaaatgtgtgaggcaccgcacacaactggcaatgtgttttttaagtcaaggtgacacatgtatttaagattttttttttaaaatctctttgcagttaaatctcactttttcaaacaagcctggatcagggcaaaacaacttatatttggttttagctggaggctcagcaggcagattgcaggcaggggggcacttttcatccatgarggcccagcctggggcctgggactctgatcaccattgtggargccagaggcagctgcgtatggaggagaaatgtcaaactgaacgcaggtttcaccactctaggaaagcagcttgttgagcccctgcagctggatgtggttagagggatgggctgaataggcaggttagatttcctgcatcaacagtgctttgggaagctgtgtggattcctgaggaagaacagggagccgagatggagccacacatgagtttgctcaccggctactgcagcactttgtacccagaatctcatgtccacaaaccccatgtaaactttcaaccactcaaagctgtttattcggctgaagaaataacttttttttctcacccagtcatttgtacctcttcatatggctatgtcgcaccctccagaaacgtggttatacttccagtcagtgtgggagaactgaagacttccggttggtcgaggaactgagggttgaccttcgggaaggaagttccactcatcttatttattatgcctgtgaatgtgggtcctgccagggagacatccagtactcggtgtctttaattgccacctggggaactgtgtttattggccttctttggggcatcctggttttggatgaagtgaggggaatacagaggtaaaagaattgtctccaccctgaagcggggagtcccgcttcacatttctggaaatggtgcagccactggggacagttctgccccgggcatggttgtttcttcaaggtcctctaaatataatccctattcttacataatccttggccctgatggttttaagcaagaactcctgtgtcccatggtctccaccactcaccatcaccctgctgtagcaagagtcctagtcaggggaggtgcattttagtagttamattgcacttatccatgagataaataaaaggagaactgtttttatcagtggaggctaacctaaaatttcaaagtgtcgcctttttgaaatcttgggcctctctctctgtagaaccaatggccctttgtggctcacggcctcgcacctaactggagagttctgagctcctgcagctcacctgagcccacagactaggcttcttggctccttccgcagcatgcctgctcacccccagaacccgcagctgtgggaagagccatgtagggaggctattcccaggcatacacttccactgccttcagctgacgtcacagctgacaaatcatctcctctatcggagccagaagacttcagctccacaaaatgaagtgttctgtcctgaaaacattcttgggaagaatcccaacatcgagaaaacggtgtcctgtgagttccaacaatgcttcttgttcatgggtttcttccgtatggagtggattaagagtgttttattttgttgttctaactgagaaaaaaaggaggcacccacaaggttgaggtcacacagtctccacagtttccaggaggcgtttgggggtggggaaggcacctccagagcatgaggctctaaggggacatgagtaaagcatgtctgtgacccagtgaggaagggagaggccagctgcactcctgcacggggttcctagctgcagaagggtcccgcctaggccgaggggaaacacctgatagcagaagaggcctggatgcacacctggcacgccgaggctctccgcccagacacagtgctccatgtcagcccctgcacctggggtgtgtgattcacgtgcacagatgccacaatcctgcaccaatatcccacagatgggggaaggtgagaggaaggggcaagtgatgtgtaactgctcaagagatgcttaaacctccatagagaggagccgggcgcaggggcatctgtgtgtcccgtcacacactgcagcagggaagggtggctggctggctccctggcatcagtggtttggtttaagctccagagggtcttattgccattgtcttttcctctgccccttgagccagcctaaggccctggagtctgtttctttaggcggatgaactgacatgctcctaccatgaccaggctctgggcaaggctcctcacagtatccttgagaggtgggcatggaagtgcccatttctcaggtacagaaaccttcagagaggataaatagcttgccctgtagaagcaggactgaaacccttgtccgcctgactcccccagctactctgcccactgtagccccctgccttactgtcctggcacacccctcaccatcctgtataccttaaatatcaaagagggcaagagagaaagggctttaaagataagttatttttttaaggaaccttaatattatttttaagaagtaaccaaattagtgacgtgaaatgcaaaaaaaaaaaaaaaaatngctgact

SEQ ID NO: 353 - DNA, 3013 bp, Homo sapiens
tcgacccacgcgtccgcccacgcgtccgcccacgcgtccgagcggtggctgggctgcgcttgggtccgtcgctgcttcggtgtccctgtcgggcttcccagcagcggcctagcgggaaaagtaaaagatgtctgaatatattcgggtaaccgaagatgagaacgatgagcccattgaaataccatcggaagacgatgggacggtgctgctctccacggttacagcccagtttccaggggcgtgtgggcttcgctacaggaatccagtgtctcagtgtatgagaggtgtccggctggtagaaggaattctgcatgccccagatgctggctggggaaatctggtgtatgttgtcaactatccaaaagataacaaaagaaaaatggatgagacagatgcttcatcagcagtgaaagtgaaaagagcagtccagaaaacatccgatttaatagtgttgggtctcccatggaaaacaaccgaacaggacctgaaagagtattttagtacctttggagaagttcttatggtgcaggtcaagaaagatcttaagactggtcattcaaaggggtttggctttgttcgttttacggaatatgaaacacaagtgaaagtaatgtcacagcgacatatgatagatggacgatggtgtgactgcaaacttcctaattctaagcaaagccaagatgagcctttgagaagcagaaaagtgtttgtggggcgctgtacagaggacatgactgaggatgagctgcgggagttcttctctcagtacggggatgtgatggatgtcttcatccccaagccattcagggcctttgcctttgttacatttgcagatgatcagattgcgcagtctctttgtggagaggacttgatcattaaaggaatcagcgttcatatatccaatgccgaacctaagcacaatagcaatagacagttagaaagaagtggaagatttggtggtaatccaggtggctttgggaatcagggtggatttggtaatagcagagggggtggagctggtttgggaaacaatcaaggtagtaatatgggtggtgggatgaactttggtgcgttcagcattaatccagccatgatggctgccgcccaggcagcactacagagcagttggggtatgatgggcatgttagccagccagcagaaccagtcaggcccatcgggtaataaccaaaaccaaggcaacatgcagagggagccaaaccaggccttcggttctggaaataactcttatagtggctctaattctggtgcagcaattggttggggatcagcatccaatgcagggtcgggcagtggttttaatggaggctttggctcaagcatggattctaagtcttctggctggggaatgtagacagtggggttgtggttggttggtatagaatggtgggaattcaaatttttctaaactcatggtaagtatattgtaaaatacatatgtactaagaattttcaaaattggtttgttcagtgtggagtatattcagcagtatttttgacatttttctttagaaaaaggaagagctaaaggaattttataagttttgttacatgaaaggttgaaatattgagtggttgaaagtgaactgctgtttgcctgattggtaaaccaacacactacaattgatatcaaaaggtttctcctgtaatattttatccctggacttgtcaagtgaattctttgcatgttcaaaacggaaaccattgattagaactacattctttaccccttgttttaatttgaaccccaccatatggatttttttccttaagaaaatctccttttaggagatcatggtgtcacagtgtttggttcttttgttttgttttttaacacttgtctcccctcatacacaaaagtacaatatgaagccttcatttaatctctgcagttcatctcatttcaaatgtttatggaagaagcacttcattgaaagtagtgctgtaaatattctgccataggaatactgtctacatgctttctcattcaagaattcgtcatcacgcatcacaggccgcgtctttgacggtgggtgtcccatttttatccgctactctttatttcatggagtcgtatcaacgctatgaacgcaaggctgtgatatggaaccagaaggctgtctgaacttttgaaaccttgtgtgggattgatggtggtgccgaggcatgaaaggctagtatgagcgagaaaaggagagagcgcgtgcagagacttggtggtgcataatggatattttttaacttggcgagatgtgtctctcaatcctgtggctttggtgagagagtgtgcagagagcaatgatagcaaataatgtacgaatgttttttgcattcaaaggacatccacatctgttggaagacttttaagtgagtttttgttcttagataacccacattagatgaatgtgttaagtgaaatgatacttgtactccccctacccctttgtcaactgctgtgaatgctgtatggtgtgtgttctcttctgttactgatatgtaagtgtggcaatgtgaactgaagctgatgggctgagaacatggactgagcttgtggtgtgctttgcaggaggacttgaagcagagttcaccagtgagctcaggtgtctcaaagaagggtggaagttctaatgtctgttagctacccataagaatgctgtttgctgcagttctgtgtcctgtgcttggatgctttttataagagttgtcattgttggaaattcttaaataaaactgatttaaataatatgtgtctttgttttgcagccctgaatgcaaagaattcatagcagttaattccccttttttgacccttttgagatggaactttcataaagtttcttggcagtagtttattttgcttcaaataaacttatttgaaaagttgtctcaagtcaaatggattcatcacctgtcatgcattgacacctgatacccagacttaattggtatttgtycttgcattggccaaagtgaaaatttttttttttttcttttg

SEQ ID NO: 354 - DNA, 1829 bp, Homo sapiens
  misc feature (1338): n equals a,t,g, or c
  misc feature (1777): n equals a,t,g, or c
  misc feature (1796): n equals a,t,g, or c
  misc feature (1798): n equals a,t,g, or c
  misc feature (1824): n equals a,t,g, or c
gttgacggcgctgcgatggctgctgcgagggcaggagaagcggactctcggttcctctcagtcggacttcctgacgccgccagtrggcggggccccttgggccgtcgccaccactgtagtcatgtacccaccgccgccgccgccgcctcatcgggacttcatctcggtgacgctgagctttggcgagagctatgacaacagcaagagttggcggcggcgctcgtgctggaggaaatggaagcaactgtcgagattgcagcggaatatgattctcttcctccttgcctttctgcttttctgtggactcctcttctacatcaacttggctgaccattggaaagctctggctttcaggctagaggaagagcagaagatgaggccagaaattgctgggttaaaaccagcaaatccacccgtcttaccagctcctcagaaggcggacaccgaccctgagaacttacctgagatttcgtcacagaagacacaaagacacatccagcggggaccamctcacctgcagattagacccccaagccaagacctgaaggatgggacccaggaggaggccacaaaaaggcaagaagcccctgtggatccccgcccggaaggagatccgcagaggacagtcatcagctggaggggagcggtgatcgagcctgagcagggcaccgagctcccttcaagaagagcagaagtgcccaccaagcctcccctgccaccggccaggacacagggcacaccagtgcatctgaactatcgccagaagggcgtgattgacgtcttcctgcatgcatggaaaggataccgcaagtttgcatggggccatgacgagctgaagcctgtgtccaggtccttcagtgagtggtttggcctcggtctcacactgatcgacgcgctggacaccatgtggatcttgggtctgaggaaagaatttgaggaagccaggaagtgggtgtcgaagaagttacactttgaaaaggacgtggacgtcaacctgtttgagagcacgatccgcatcctgggggggctcctgagtgcctaccacctgtctggggacagcctcttcctgaggaaagctgaggattttggaaatcggctaatgcctgcyttcagaacaccatccaagattccttactcggatgtgaacatcggtactggagttgcccacccgccacggtggacctccgacagcactgtggccgaggtgaccagcattcagctggagttccgggagctctcccgtctcacaggggataagaagtttcaggaggcagtggagaaggtgacacagcacatccacggcctgtctgggaagaaggatgggctggtgccatgttncatcaatacccacagtggcctcttcacccacctgggcgtattcacgctgggcgccagggccgacagctactatgagtacctgctgaagcagtggatccagggcgggaagcaggagacacagctgctggaagactacgtggaagccatcgagggtgtcagaacgcacctgctgcggcactycgagcccagtaagctcacctttgtgggggagcttgcccacggccgcttcagtgccaagatggaccacctggtgtgcttcctgccagggacgctggctctgggcgtctaccacggcctgcccgccagccacatggagctggcccaggagctcatggagacttgttaccagatgaaccggcagatggagacggggctgagtcccgagatcgtgcmattcaactttaccccmsccrggccygggggccccggttccgggggnaaccggttggggaaggggntnccaaaaagggcccccaagggcccaanggaaa

SEQ ID NO: 355 - DNA, 1642 bp, Homo sapiens
  misc feature (990): n equals a,t,g, or c
  misc feature (1009): n equals a,t,g, or c
  misc feature (1619): n equals a,t,g, or c
  misc feature (1641): n equals a,t,g, or c
gattgctcccccaccctggccgcatgctaacattcatggaggcagacatgtgtacccagaatcagagggagccggttatcctcagttggagatcccaaaagacttctgcatacagttcctttcgttggatggcacaagaaagctcagagcccatgggagatttaatttattatcatataagactccttggaatgaatatatgtgttatctttccaaatgaccttactttattctacttatgtatacaatttctctgtcataatgtcttattttgtttttctttttcaattgtggaagaaggcagatcatcaaagttgttatgaataagtgtttagaagtacaatcaagcctgcaagtagttattaaggtctaatattgcaaatgctgaggtgacatgagacaaaggaggcaakatttctkatctaaagatacttgtattctggctgggtggagaagccataaactcctaaggaattagctcaaagtaagtcaacatgtgcatacatctgttgcaccaaaatgaaagcccaaccctgactttaatgacatcagtttctagaaaaacactattatagcaccaatcagaaaagccaagtaactaaatcttttaattttctgggcacactaagrcttaagtagkctgaggatatcagggtggaaataaatgtagaaaaagttattgtgattccatggtagtggaaactcccatacacttctctttccctttctctttctcttttcctctcttctctttcttgattcctctgtctctctatcattggctttccccttgctaccctggcagacctgattgacaggtgtgacaattcccatggcaagctaatcccaccaggctggcagcttttgaaatttctatgtaaatacagtatttgtctaagtaccacacttaaatacagtagttaacgtttaagcacccacaggttggttctctttgtacttgaatcaacaaccattttcagctcttagaanggaccacccacaaaactgnactttttgactgtagaaaaactcagggagraaccaaataaaatgaagcaaaaagttgagagaaaaaaaacccccaaaaaccmcaaaaytaaattatcgctaaattatcgacccaaggaggcatggttaggctaaggccaaaaactctgaattaaacttccaaatctaaccagctacctctagatgtaaacctgattttcatcttttctatcacccacatagacatgacttttttttccagacatcttgattacagttaatgttaaaatagcttcaagtctaaaatgcagatgtgttgtcttgaactgaaacgaactatcaaacagacaatgataaataatgatcatttaaacttggccttttaaaaagcacattggatacaataaaaatcagtgtattagtacactaaatgtgcttccaattatgatataaatagtgcataaagctttaaaattttcatcaaattaatgtatcactgacatgcaaattaactactgacatctatggtgtatgccatgtgatgatttctaattggcaagtgaacctcagaggattatttatagattacactgcaacaaagtgctggagtaaattcgcatggtccagctcantcawwttggaatttgggctaant

SEQ ID NO: 356 - DNA, 2020 bp, Homo sapiens
gcggacgcgtgggttggagaagaacagtacttcacttaaagagaaagagcacaataaagaaccagattcaagtgtgagcaaagaagtagatgacaaggatgcaccaaggactgaggaaaacaaaatacagcacaatgggaattgtcagctgaatgaagaaaacctctctaccaaaacagaagcagtataggaccgacaagtgtacctctgcactcaatgctggaatcaaatccaaagcttttaattctctcaacaagatgtaaacaggaaagaaatctagttgagcatgaagataggatctaacagcttttccagttgttagatgactttgtggccatcttgttattgagtaagaaaataaagcatggacatcatgaaaataacagatgttacccaaactcatcttctaaaatctgtgcatttccatggtggctgacacacttgtcatgtggtctgttagtgtttgccaagaaccattgcaaataaattgaacatcaaagatccaagtttgtactatccctaaagactggagataagcattggaggctcttttaaaaaatgctagttactgaattttgtattgttttacttttttttttatttcaatatatacagtttgatgatgtgcttgaaattggtgcaaatatatacacacccttgtaagtgcaaagtatgtaagaagttttaacatttacttcacaggacttgtgattgtgttaaattctcactattgtgttttcttttgctcactgtttaggacaatttttctttaaaatagttttgcagattaaaattgcttaaataagtggattaaaaaactgacaatgcatgctactgttctctttcaaaaggaagagcaaccgtgttgaatactaataatgatgaattagtattcagtgtttagaatcattgggactacccacaaagtgagcatttctttttaaattttcttgacatttccaagcttattatgaataatattgcagtgtgtcttgtcagctgtaggtggcaaaggtgcccttataaaaaaggaaactggcttttcaaaatgggctatgggagcacaagctgaagctttagtgccttctacaatgtggtatactgttttctagaattttatatgtgctagtcattctcaattcatatggaatctagatggatatttcatgcatacccatagagaagtgtgtaagtgatatgtcagaagagcttcttactgatttcacctaaaatgagaaggaagtcctgttttcaagaatgacattagagtcatgcagctttgggaccatcagttttatactgtgataattgaaaatgaaacatgttcttattttccttaaattgaagaaaaccctttagttgtctacattggatggccttattacctctcaatcatcttttcataaatgatgtgcagaaattgtacttaaggacttaggagtatatgggaggttattggttttatgtttaaggatacgtttacttgagtttaagatacaggtcatccatcattcttaggctcactttttacagaaagtatgcaaatagtaaagtgacagcactgctaatgtttttccccagtactataacttgtggtttctgaactcattattgttgtatttccaaaaaagtaataccttttaattagtgtattaaaagttaagtataattattttaatgcaatctaatacaatcagattactcagttgccttacctcatgggaagagttacttttttagatctaaaaagctgaatagcatgttagttacttggtttcaacttgagttttcttttaatgttaataagattgaaactttagtatttagtggggaatggaaagagttgcccttgttgcaagtaatgaagcctgatttgattatgaagctgcttaatcactcttcatgtgttcagaattactgttttttttgtttgtttttcctttttgtcactgtgtacattaaaattttggaagatgctttactatgtaaaaaaaaaaaaaaaaaaaaaaaaagggcggcc

SEQ ID NO: 357 - DNA, 1217 bp, Homo sapiens
  misc feature (1141): n equals a,t,g, or c
  misc feature (1149): n equals a,t,g, or c
  misc feature (1157): n equals a,t,g, or c
gaatatcagtatacgcagggaatacattaagcagaatcctatggctactgagaaattattatcactgttgcctgaatatgtagttccatacatgattcacctgctagcccatgatccagattttacaagatcacaagatgttgatcagcttcgtgatatcaaagagtgcctatggttcatgcttgaagttttaatgacaaagaatgaaaacaatagccatgcctttatgaagaagatggcagagaacatcaagttaaccagagatgcccagtctccagatgaatccaagacaaatgaaaaactgtatacagtatgtgatgtggctctctgtgttataaatagtaaaagtgctttgtgcaatgcagattcaccaaaggacccagtcctcccaatgaaattttttacacaacctgaaaaggacttctgtaacgataagagttatatttcagaagagacaagagtacttctgttaacaggaaagccaaagcctgctggagtactaggtgcagtaaataagcctttatcagcaacgggaaggaaaccctatgttagaagcactggcactgagactggaagcaatattaatgtaaattcagagctgaacccttcaaccggaaatcgatcaagggaacagagttcagaggcagcagaaactggagttagtgaaaatgaagagaaccctgtgaggattatttcagtcacacctgtaaagaatattgacccagtaaagaataaggaaattaattctgatcaggctacccagggcaacatcagcagtgaccgaggaaagaaaagaacagtaacagcagctggtgcagagaatatccaacaaaaaacagatgagaaagtagatgaatcgggacctcccgccccttccaaacccaggagaggacgtcgacccaagtctgaatctcagggcaatgctaccaaaaatgatgatctaaataaacctattaacaagggaaggaagagagctgcagtgggtcaggagagccctgggggtttggaagcaggtaatgccaaagcacccaaactgcaagatttagccaaaaaggcagcaccagcagaaagacmaattgacttacaaaggtraaaatgcatttgcaaagggagaaaatgaaggccaaacagaagcaggctnccagyttntgcaaaancttggattacaatgkcctgacagaaatgacttattcaaccaattttgcttgaactaagag

SEQ ID NO: 358 - DNA, 1963 bp, Homo sapiens
  misc feature (3): n equals a,t,g, or c
atncaagctctaatacgactcactataggggggggagcgcaagcgaggcagccatgtcttatcccgctgatgattatgagtctgaggcggcttatgacccctacgcttatcccagcgactatgatatgcacacaggagatccaaagcaggaccttgcttatgaacgtcagtatgaacagcaaacctatcaggtgatccctgaggtgatcaaaaacttcatccagtatttccacaaaactgtctcagatttgattgaccagaaagtgtatgagctacaggccagtcgtgtctccagtgatgtcattgaccagaaggtgtatgagatccaggacatctatgagaacagctggaccaagctgactgaaagattcttcaagaatacaccttggcccgaggctgaagccattgctccacaggttggcaatgatgctgtcttcctgattttatacaaagaattatactacaggcacatatatgccaaagtcagtgggggaccttccttggagcagaggtttgaatcctattacaactactgcaatctcttcaactacattcttaatgccgatggtcctgctccccttgaactacccaaccagtggctctgggatattatcgatgagttcatctaccagtttcagtcattcagtcagtaccgctgtaagactgccaagaagtcagaggaggagattgactttcttcgttccaatcccaaaatctggaatgttcatagtgtcctcaatgtccttcattccctggtagacaaatccaacatcaaccgacagttggaggtatacacaagcggaggtgaccctgagagtgtggctggggagtatgggcggcactccctctacaaaatgcttggttacttcagcctggtcgggcttctccgcctgcactccctgttaggagattactaccaggccatcaaggtgctggagaacatcgaactgaacaagaagagtatgtattcccgtgtgccagagtgccaggtcaccacatactattatgttgggtttgcatatttgatgatgcgtcgttaccaggatgccatccgggtcttcgccaacatcctcctctacatccagaggaccaagagcatgttccagaggaccacgtacaagtatgagatgattaacaagcagaatgagcagatgcatgcgctgctggccattgccctcacgatgtaccccatgcgtatygatgagagcattcacctccagctgcgggagaaatatggggacaagatgttgcgcatgcagaaaggtgacccacaagtctatgaagaacttttcagttactcctgccccaagttcctgtcgcctgtagtgcccaactatgataatgtgcaccccaactaccacaaagagcccttcctgcagcagctgaaggtgttttctgatgaagtacagcagcaggcccagctttcaaccatccgcagcttcctgaagctctacaccaccatgcctgtggccaagctggctggcttcctggacctcacagagcaggagttccggatccagcttcttgtcttcaaacacaagatgaagaacctcgtgtggaccagcggtatctcagccctggatggtgaatttcagtcagcctcagaggttgacttctacattgataaggacatgatccacatcgcggacaccaaggtcgccaggcgttatggggatttcttcatccgtcagatccacaaatttgaggagcttaatcgaaccctgaagaagatgggacagagaccttgatgatattcacacacattcaggaacctgttttgatgtattataggcaggaagtgtttttgctaccgtgaaacctttacctagatcagccatcagcctgtcaactcagttaacaagttaaggaccgaagtgtttcaagtggatctcagtaaaggatctttggagccagaaaaaaaaaaaaaaaaaaaaaaaaaaaaaaaaaaaaaaaaaaaaaaaaa

SEQ ID NO: 359 - DNA, 1387 bp, Homo sapiens
  misc feature (1313): n equals a,t,g, or c
  misc feature (1321): n equals a,t,g, or c
  misc feature (1348): n equals a,t,g, or c
ggtggaggtcgcggctgagcgagcgagccctgggcgagtgaattgtggctgtgggttgacggtggagacaccccccggaggaggcggagggaagggaggcgaggcctgcacctgcatgcttcccgcctcccactccccagcgcccccggaccgtgcagttctctgcaggaccaggccatggagctcgaagtccggcgggtccgacaggcgttcctgtccggccggtcgcgacctctgcggtttcggctgcagcagctggaggccctgcggaggatggtgcaggagcgcgagaaggatatcctgacggccatcgccgccgacctgtgcaagagtgaattcaatgtgtacagtcaggaagtcattactgtccttggggaaattgattttatgcttgagaatcttcctgaatgggttactgctaaaccagttaagaagaacgtgctcaccatgctggatgaggcctatattcagccacagcctctgggagtggtgctgataatcggagcttggaattaccccttcgttctcaccattcagccactgataggagccatcgctgcaggaaatgctgtgattataaagccttctgaactgagtgaaaatacagccaagatcttggcaaagcttctccctcagtatttagaccaggatctctatattgttattaatggtggtgttgaggaaaccacggagctcctgaagcagcgatttgaccacattttctatacgggaaacactgcggttggcaaaattgtcatggaagctgctgccaagcatctgacccctgtgactcttgaactgggagggaaaagtccatgttatattgataaagattgtgacctgggacattgtttgcagacgcataacctggggaaaatacatgaattgtggccaaacctgcattgcacccgactatattctctgtgaagcatccctccaaaatcaaattgtatggaagattaaggaaacagtgaaggaattttatggagaaaatataaaagagtctcctgattatgaaaggatcatcaatcttcgtcattttaagaggatactaagtttgcttgaaggacaaaagatagcttttggtggggagactgatgaggccacacgctacatagccccaacagtacttaccgatgttgatcctaaaaccaaggtgatgcaagaagaaatttttggaccaattcttccaatagtgcctgtgaaaaatgtagatgaggccataaatttcataaatgaacgtgaaaagcctctggtctttaatgtattttcgcataaccataagctcatccaaacgggtgattgatgagacnccattggngtgtcacaggcatgacgtcttatgcantcacggtcacccttcccctttggaggatgggtccatggg

SEQ ID NO: 360 - DNA, 388 bp, Homo sapiens
  misc feature (356): n equals a,t,g, or c
  misc feature (359): n equals a,t,g, or c
  misc feature (370): n equals a,t,g, or c
  misc feature (371): n equals a,t,g, or c
  misc feature (376): n equals a,t,g, or c
ggtggctgggcgcggtggctcacgcctacaatcccagcactttgggaggctgaggcagcggatcacaaggtcaggagatcgagaccatcctggctaacacggtgaaactcagtctctactaaaaatagaaaaaaataaaccaggcgtggtggcacggcctgtaatcctagccacttgggaggctgaggcaggagaatcgcctgaacccaggaggcggaggttgcagtgagccaagatcgcaccactgcactccagcctgggtgatggagcgagactctatctcaaaaaaaaaattgtgcatgtaaaacatgaaattataacctgtgctctttggatacctaatgcgacatttaagntgnatttgacagtnnatagnattttggatcta

SEQ ID NO: 361 - DNA, 291 bp, Homo sapiens
  misc feature (9): n equals a,t,g, or c
  misc feature (18): n equals a,t,g, or c
  misc feature (21): n equals a,t,g, or c
  misc feature (22): n equals a,t,g, or c
  misc feature (33): n equals a,t,g, or c
  misc feature (40): n equals a,t,g, or c
  misc feature (41): n equals a,t,g, or c
  misc feature (42): n equals a,t,g, or c
  misc feature (45): n equals a,t,g, or c
  misc feature (60): n equals a,t,g, or c
  misc feature (67): n equals a,t,g, or c
  misc feature (68): n equals a,t,g, or c
  misc feature (97): n equals a,t,g, or c
  misc feature (113): n equals a,t,g, or c
  misc feature (114): n equals a,t,g, or c
  misc feature (154): n equals a,t,g, or c
  misc feature (157): n equals a,t,g, or c
  misc feature (207): n equals a,t,g, or c
  misc feature (235): n equals a,t,g, or c
  misc feature (260): n equals a,t,g, or c
  misc feature (279): n equals a,t,g, or c
  misc feature (289): n equals a,t,g, or c
gccatcctncgtctaganctnnctggccggganctgaccnnntanctcatgaagatcctngtcgagnnaaggctacagcttcaccaccacggccgancggggaaatcgtgcgnnacatcaaggagaagctgtgctacgtcgccctgggacttcnagnaggagatggccaccgccgcatcctcctcttctctggagaagagctacganctgcccgatggccaggtcatcaccattngcaatgagcggttccggtgtccggnaggcgctgttccagccttnccttcctggngt

SEQ ID NO: 362 - DNA, 412 bp, Homo sapiens
  misc feature (360): n equals a,t,g, or c
  misc feature (385): n equals a,t,g, or c
cctgctttgaacactctaattttttcaaagtaaacgcttcgggccccgcgggacactcagctaagagcatcgagggggcgccgagaggcaaggggcggggacgggcggtggctcgcctcgcggcggaccgcccgcccgctcccaagatccaactacgagctttttaactgcagcaactttaatatacgctattggagctggaattaccgcggctgctggcaccagacttgccctccaatggatcctcgttaaaggatttaaagtggactcattccaattacagggcctcgaaagagtcctgtattgttatttttcgtcactacctccccgggtcgggagtgggtaatttgcgcgcctgcngccttccttggatgtggtagccgtntctcaagctccctctccggaatcgaat

SEQ ID NO: 363 - DNA, 351 bp, Homo sapiens
  misc feature (47): n equals a,t,g, or c
  misc feature (274): n equals a,t,g, or c
  misc feature (304): n equals a,t,g, or c
  misc feature (307): n equals a,t,g, or c
  misc feature (308): n equals a,t,g, or c
  misc feature (332): n equals a,t,g, or c
ggcacgagcaaaggccgcggcactcccacgcggaccccgaagtccgnaacccggggatgggcccgcggctgcgaggggatcttctctggatcaagcaatggtggtgaaaaatgtttcgcaagggcaaaaaacgacacagtagtagcagttcccaaagtagcgaaatcagtactaagagcaaggacaaagcaacaataattcagatacctgtgcagaatttcgaataaaatatgttggtgccattgagaaactgaaactctccgagggaaaaggncttgaagggccattgagacctgataaattntgnnagacgttggcccagcaaggttggnaagtttgccttttgtttcc

SEQ ID NO: 364 - DNA, 329 bp, Homo sapiens
  misc feature (10): n equals a,t,g, or c
  misc feature (17): n equals a,t,g, or c
  misc feature (19): n equals a,t,g, or c
  misc feature (24): n equals a,t,g, or c
  misc feature (26): n equals a,t,g, or c
  misc feature (28): n equals a,t,g, or c
  misc feature (31): n equals a,t,g, or c
  misc feature (34): n equals a,t,g, or c
  misc feature (38): n equals a,t,g, or c
  misc feature (40): n equals a,t,g, or c
  misc feature (41): n equals a,t,g, or c
  misc feature (42): n equals a,t,g, or c
  misc feature (44): n equals a,t,g, or c
  misc feature (139): n equals a,t,g, or c
  misc feature (147): n equals a,t,g, or c
  misc feature (208): n equals a,t,g, or c
  misc feature (262): n equals a,t,g, or c
  misc feature (298): n equals a,t,g, or c
  misc feature (306): n equals a,t,g, or c
  misc feature (315): n equals a,t,g, or c
aattcggcanagctcgntntggancnanatncgnggcnannnangaattgaagattatagaggaaatgttggtgttgtactgtttaattttggcaaagaaaagtttgaagtcaaaaaaggtgatcgaattgcacagctncatttgcnaacggattttttatccagaaatagaagaagttcaagccttggatgacaccgaaagggtttncaggaggttttggttccactggaaagaattaaaatttatgccaagaacagaaancaagaagtcatacctttttcttaaaaaaaaaaaaanggtttttncttccaagngttttgggggtttt

SEQ ID NO: 365 - DNA, 663 bp, Homo sapiens
  misc feature (493): n equals a,t,g, or c
  misc feature (508): n equals a,t,g, or c
  misc feature (525): n equals a,t,g, or c
  misc feature (634): n equals a,t,g, or c
  misc feature (648): n equals a,t,g, or c
  misc feature (662): n equals a,t,g, or c
gctgcgctcggctgagtcagtcagtctgtcggagtctgtcctcggagcaggcggagtaaagggacttgagcgagccagttgccggattattctatttcccctccctctctcccgccccgtatctcttttcacccttctcccaccctcgctcgcgtagccatggcggagccgtcggcggccactcagtcccattccatctcctcgtcgtccttcggagccgagccgtccgcgcccggcggcggcgggagcccaggagcctgccccgccctggggacgaagagctgcagctcctcctgtgcggtgcacgatctgattttctggagagatgtgaagaagactgggtttgtctttggcaccacgctgatcatgctgctttccctggcagctttcagtgtcatcagtgtggtttcttacctcatcctggctcttctctctgtcaccatcagcttcaggatctacaagtccgtcatccaagctgtacagaagtcagaanaagggcatccattcnaagcctacctggacttnacattactctgtcctcagaactttccataattactgaatgctgccatggtgcacatcaacagggcctgaaaatcattattcgtctctttctggtaaaaatctggttgantccttgaaactggntgtcttcatgtggnt

SEQ ID NO: 366 - DNA, 238 bp, Homo sapiens
  misc feature (21): n equals a,t,g, or c
  misc feature (67): n equals a,t,g, or c
  misc feature (223): n equals a,t,g, or c
ctgagactccagcaggatgtnttatcaacagcagcagtgcaagcagccctgccagccacctcctgtntgccccgcgccaaagtgcccagagccatgtccacccccgaagtgccctgagccctgcccaccatcaaagtgtccacagtcctgcccacctcagcagtgccagcagaaatgtcctcctgtgacaccttccccaccctgccagccaaagtgttcaccnaagagcaagtaacag

SEQ ID NO: 367 - DNA, 291 bp, Homo sapiens
  misc feature (38): n equals a,t,g, or c
  misc feature (133): n equals a,t,g, or c
  misc feature (227): n equals a,t,g, or c
  misc feature (247): n equals a,t,g, or c
  misc feature (275): n equals a,t,g, or c
  misc feature (279): n equals a,t,g, or c
  misc feature (280): n equals a,t,g, or c
caccgaggtcgcacgcgtgagacttctccgaccgtcanacgccgccgcgatgcgctacgtcgcctcctacctgctggctgccctagggggcaactcctcccccagcgccaaggacatcaagaagatcttgganagcgtgggtatcgaggcggacgacgaccggctcaacaaggttatcagtgagctgaatggaaaaaacattgaagacgtcattgcccagggtattngcaagcttgccagtgtaccngctggttgggggctgtaaccgtctctgntggnnccaagcctctg

SEQ ID NO: 368 - DNA, 400 bp, Homo sapiens
  misc feature (76): n equals a,t,g, or c
  misc feature (87): n equals a,t,g, or c
  misc feature (129): n equals a,t,g, or c
  misc feature (135): n equals a,t,g, or c
  misc feature (149): n equals a,t,g, or c
  misc feature (152): n equals a,t,g, or c
  misc feature (164): n equals a,t,g, or c
  misc feature (186): n equals a,t,g, or c
  misc feature (236): n equals a,t,g, or c
  misc feature (303): n equals a,t,g, or c
  misc feature (306): n equals a,t,g, or c
  misc feature (312): n equals a,t,g, or c
  misc feature (317): n equals a,t,g, or c
  misc feature (320): n equals a,t,g, or c
  misc feature (322): n equals a,t,g, or c
  misc feature (326): n equals a,t,g, or c
  misc feature (336): n equals a,t,g, or c
  misc feature (341): n equals a,t,g, or c
  misc feature (345): n equals a,t,g, or c
  misc feature (355): n equals a,t,g, or c
  misc feature (361): n equals a,t,g, or c
  misc feature (370): n equals a,t,g, or c
  misc feature (372): n equals a,t,g, or c
  misc feature (373): n equals a,t,g, or c
  misc feature (388): n equals a,t,g, or c
aattcggcacagctgccgctggctcttcgctcgcgggtatggtgagctccgagctgcagctggttgagcagcggtngccgcagcttncccgacttccccaccccaggggtggtattcagggacatctcncccgtnttgaaggaccccgnctnctttcgcgccgncatcggcctcctggcgcgacanctgaaggcgacccacgggggccgcatcgactacatcgcaggcctagactnccggagagttcctcttttggccctccctggtccaggagctttggactgggctgcgtggttaatccgnaancggtgngaagntgncnaggncccaattctntgggnttantgatttcctnggagtnaggggaagntnnaggttgaggatttangaaaaaggcctt

SEQ ID NO: 369 - DNA, 428 bp, Homo sapiens
  misc feature (235): n equals a,t,g, or c
  misc feature (293): n equals a,t,g, or c
  misc feature (308): n equals a,t,g, or c
  misc feature (342): n equals a,t,g, or c
  misc feature (375): n equals a,t,g, or c
  misc feature (390): n equals a,t,g, or c
  misc feature (419): n equals a,t,g, or c
  misc feature (425): n equals a,t,g, or c
ccacctcgcaggtgcgccagaactaccaccaggactcagaggccgccatcaaccgccagatcaacctggagctctacgcctcctacgtttacctgtccatgtcttactactttgaccgcgatgatgtggctttgaagaactttgccaaatactttcttcaccaatctcatgaggagagggaacatgctgagaaactgatgaagctgcagaaccacgaggtggccgaatcttcttnaggatatcaagaaaccagactgtgatgactgggagaacggctgaatgcaatggaatgngcattacattttggnaaaaaatggggaattaatcacttctgggaactgnacaaactgggcacttgccaaaaatggcccccantttgggggactttanttgagacccaattacctgatagccaggtnaaaagncct

SEQ ID NO: 370 - DNA, 433 bp, Homo sapiens
  misc feature (14): n equals a,t,g, or c
  misc feature (31): n equals a,t,g, or c
  misc feature (44): n equals a,t,g, or c
  misc feature (51): n equals a,t,g, or c
  misc feature (57): n equals a,t,g, or c
  misc feature (128): n equals a,t,g, or c
  misc feature (203): n equals a,t,g, or c
  misc feature (204): n equals a,t,g, or c
  misc feature (219): n equals a,t,g, or c
  misc feature (229): n equals a,t,g, or c
  misc feature (252): n equals a,t,g, or c
  misc feature (256): n equals a,t,g, or c
  misc feature (276): n equals a,t,g, or c
  misc feature (300): n equals a,t,g, or c
  misc feature (305): n equals a,t,g, or c
  misc feature (308): n equals a,t,g, or c
  misc feature (309): n equals a,t,g, or c
  misc feature (350): n equals a,t,g, or c
  misc feature (362): n equals a,t,g, or c
  misc feature (385): n equals a,t,g, or c
caagcttgtgaggnctcctgttcaggtatanggtattgaaggtngctatgncacagntctttattctgctgcatcaaaacagaataagctggagcaagtagaaaaggagttgttgagagtagcacaantcctgaaggaacccaaagtggctgcttctgttttgaatccctatgtgaagcgttccattaaagtgaaaagcctanntgacatcacagcaanagagaggttntctcccctacactaccaacctgntcantttgcttgctgaaaatggtngattaagccgatacccaaggagtngtttntgnnttttctaacatggatgagtgtccatcgcggagaggtacttncacagtgacctntggaatctcctttagaagaagcnacactcctctgaattagaaatgtcctcaaggcttcctgaggcaaggca

SEQ ID NO: 371 - DNA, 538 bp, Homo sapiens
  misc feature (511): n equals a,t,g, or c
  misc feature (513): n equals a,t,g, or c
  misc feature (529): n equals a,t,g, or c
aaaggacgaacctgatctcttatactagtatccttaatcatttttattgccacaactaacctcctcggactcctgcctcactcatttacaccaaccacccaactatctataaacctagccatggccatccccttatgagcgggcgcagtgattataggctttcgctctaagattaaaaatgccctagcccacttcttaccacaaggcacacctacaccccttatccccatactagttattatcgaaaccatcagcctactcattcaaccaatagccctggccgtacgcctaaccgctaacattactgcaggccacctactcatgcacctaattggaagcgccaccctagcaatatcaaccattaaccttccctctacacttatcatcttcacaattctaattctactgactatcctagaaatcgctgtcgccttaatccaagcctacgttttcacacttctagttaagcctctacctgcacgacaacacataaaaaaaaaaaaaaaaaaantnaaggggggggcgggtncccaatccc

SEQ ID NO: 372 - DNA, 405 bp, Homo sapiens
  misc feature (2): n equals a,t,g, or c
  misc feature (5): n equals a,t,g, or c
  misc feature (7): n equals a,t,g, or c
  misc feature (9): n equals a,t,g, or c
  misc feature (11): n equals a,t,g, or c
  misc feature (19): n equals a,t,g, or c
  misc feature (39): n equals a,t,g, or c
  misc feature (42): n equals a,t,g, or c
  misc feature (45): n equals a,t,g, or c
  misc feature (59): n equals a,t,g, or c
  misc feature (64): n equals a,t,g, or c
  misc feature (78): n equals a,t,g, or c
  misc feature (144): n equals a,t,g, or c
  misc feature (181): n equals a,t,g, or c
  misc feature (198): n equals a,t,g, or c
  misc feature (241): n equals a,t,g, or c
  misc feature (267): n equals a,t,g, or c
  misc feature (282): n equals a,t,g, or c
  misc feature (362): n equals a,t,g, or c
tncancncntnactacccncactaaagggaacaaaagcnggngcnccaccgcggtgcgnccgcnctagaactagtggntcccccgggctgcaggaattcggcacgaggtcgccaagatggtgaagcccaagtacaaaggacggngcaccatcaacccgtccaaggccagcacaaacccagntcgagtgcagggagcangaggccaaaacatgagggaccgggccaccatccggcgcctgantatgtataggcaaaaggagcgcaggnacagtcgtggtaaantaattaaacccctgcaatatcaatcaacggtggcttctggcacagtggcaagagtagagccaaatattaaatggtttggnaacacacgtgtgattaagcagtcatcattacaaaaatttcaag

SEQ ID NO: 373 - DNA, 460 bp, Homo sapiens
gcaagaacgccctggagaagtacggacccctgaagcccctgccacagaccccgcacctggaggaggacttgaaggaggtgctgcgttctgaggctggcatcgaactcatcatcgaggacgacatcaggcccgagaagcagaagaggaagcctgggctgcggcggagccccatcaagaaagtccggaagtctctggctcttgacattgtggatgaggatgtgaagctgatgatgtccacactgcccaagtctctatccttgccgacaactgccccttcaaactcttccagcctcaccctgtcaggtatcaaagaagacaacagcttctcccaagcccacgtcaggcctggcctcatctcagaccctgcttaggatgggggatgtggcaggggtgctcctgtgctcaccctctcttggtgcatttttttggaagaataaaattgcctctctctttaaaaaaa

SEQ ID NO: 374 - DNA, 393 bp, Homo sapiens
  misc feature (343): n equals a,t,g, or c
  misc feature (376): n equals a,t,g, or c
  misc feature (377): n equals a,t,g, or c
  misc feature (378): n equals a,t,g, or c
  misc feature (393): n equals a,t,g, or c
gccctgagccccctgaatcttggagtggtgtgagggatggaaccacccatccggccatgtgtctacaggacctcaccgcagtggagtcagagtttcttagccagttcaacatgaccttcccttcctcacctccaccttctccctgccttctctcttctctcgtctgagcccccaggccttttccactttgagggaggtgcttcgaagaatgttgcccacacctaagtgttagaagcctatgtccgttcatccctgagaggtctgaaagaataaaaataaattctaaaaaaaaaaaaaaaaaactcgagggggggccccggacccaatttgccctatagggagncgattacaattcactgccgcgttttacaacgtnnngactggaaaaacccn

SEQ ID NO: 375 - DNA, 587 bp, Homo sapiens
  misc feature (24): n equals a,t,g, or c
  misc feature (30): n equals a,t,g, or c
  misc feature (75): n equals a,t,g, or c
  misc feature (118): n equals a,t,g, or c
  misc feature (135): n equals a,t,g, or c
  misc feature (137): n equals a,t,g, or c
  misc feature (208): n equals a,t,g, or c
  misc feature (209): n equals a,t,g, or c
  misc feature (322): n equals a,t,g, or c
  misc feature (332): n equals a,t,g, or c
  misc feature (375): n equals a,t,g, or c
  misc feature (383): n equals a,t,g, or c
  misc feature (402): n equals a,t,g, or c
  misc feature (415): n equals a,t,g, or c
  misc feature (417): n equals a,t,g, or c
  misc feature (433): n equals a,t,g, or c
  misc feature (439): n equals a,t,g, or c
  misc feature (461): n equals a,t,g, or c
  misc feature (464): n equals a,t,g, or c
  misc feature (486): n equals a,t,g, or c
  misc feature (496): n equals a,t,g, or c
  misc feature (502): n equals a,t,g, or c
  misc feature (529): n equals a,t,g, or c
  misc feature (554): n equals a,t,g, or c
  misc feature (576): n equals a,t,g, or c
gccataacccaataccaaacgccnctcttngtctgatccggactaatcacagcagggcctacttctcctatctcncccagtcctagctgctggcatcactatactactaacagaccgnaacctcaacaccacctncntcgaccccgccggaggaggagaccccattctataccaacacctattctgatttttcggacaccctgaaggnnatattcttatcctaccaggcttcggaataatctcccatattgtaacttactactccggaaaaaaagaaccatttggatacataggtatggactgagctatgatatcaattggnttcctagggnttatcgtgagagcacaccatatatttacagtaggaatagacgnagacacangagcatatttcacctgcgntaccataatcatngntatccccaaacggggncaaagnaattaagctggactaggcacanttncaagggaagcaataatgaaaanggactgctgnaagagnttctgagccctaaggaatcaactttcntttcaaccggaaggggggccgaatngggaatgggattaaccaaactnaataattggaa

SEQ ID NO: 376 - DNA, 461 bp, Homo sapiens
  misc feature (38): n equals a,t,g, or c
  misc feature (41): n equals a,t,g, or c
  misc feature (60): n equals a,t,g, or c
  misc feature (66): n equals a,t,g, or c
  misc feature (74): n equals a,t,g, or c
  misc feature (209): n equals a,t,g, or c
  misc feature (218): n equals a,t,g, or c
  misc feature (220): n equals a,t,g, or c
  misc feature (240): n equals a,t,g, or c
  misc feature (314): n equals a,t,g, or c
  misc feature (332): n equals a,t,g, or c
  misc feature (430): n equals a,t,g, or c
gtcaaaattaaccctcactaaagggaacaaaagctggngcnccaccgcggtgcgaccgcnctaganctagtggntcccccggcctgcaggaattcggcacgaggtgaaaactacccctaaaagccaaaatgggaaaggaaaagactcatatcaacattgtcgtcattggacacgtagattcgggcaagtccaccactactggccatctnacctataantncggtggcatcgacaaaaganccattgaaaaatttgagaaggaggctgctgagatgggaaagggctccttcaagtatgcctgggtcttggataanctgaaagctgagcgtgancgtggtatcaccattgatatctccttgtggaaatttgagaccagcaagtactatgtgactatcattgatgccccaggacacagagactttatcaaaancatgattacagggacatctcaggctgactgt

SEQ ID NO: 377 - DNA, 517 bp, Homo sapiens
  misc feature (261): n equals a,t,g, or c
  misc feature (484): n equals a,t,g, or c
  misc feature (488): n equals a,t,g, or c
  misc feature (508): n equals a,t,g, or c
  misc feature (515): n equals a,t,g, or c
  misc feature (517): n equals a,t,g, or c
gaataggaattacaaggccagacttagtggccttgtgtcataggagccatggtgtttaatatcagactttgttttaacaattgaaagcccaccgaaggtgcactaaagcaagcccttgatttattttttgagtcaaacttcttgtggtgttttgcggggatagtgcttattgaattttgggtttctttgaaataatcactgtttgtttcccctttgtagctgggaacttctggggtaggacgttgctgctatcttcagttncacagacccaaccagttacgatggttttggaccatttatgccgggattcgacatcattccctataatgatctgcccgcactggaggtatttcactagcgtcatagtgctcagctcattgggaatagaaattaaagctgttgaatatatgaattaaaagtcattatatgacagtaatgcaaatttatctcacttaaggtaaccacgattcagacttggtcttantacnatcaattagtttccaacccngagaaantn

SEQ ID NO: 378 - DNA, 302 bp, Homo sapiens
  misc feature (1): n equals a,t,g, or c
  misc feature (56): n equals a,t,g, or c
  misc feature (61): n equals a,t,g, or c
  misc feature (137): n equals a,t,g, or c
  misc feature (167): n equals a,t,g, or c
  misc feature (191): n equals a,t,g, or c
  misc feature (210): n equals a,t,g, or c
  misc feature (242): n equals a,t,g, or c
  misc feature (245): n equals a,t,g, or c
  misc feature (293): n equals a,t,g, or c
  misc feature (296): n equals a,t,g, or c
naccatacaaaagggaacaaaagcatggagcatccaccgcggtggcggccgctctngaacnagtggatcccccgggctgcaggaattcggcacgagcgcaggccctgaaatgcagactggccgaaataactttgtcntccggcggaacccagctgaccctcagcgcnttccctccaacccttcccaccgtntccagtgtgcagcaggctncgagcaaagtgaacacaacgtgtgccaagacntanacgagtgcactgcagggacgcacaactgtagagcagaccaagtgtgcntcnatttac

SEQ ID NO: 379 - DNA, 491 bp, Homo sapiens
  misc feature (3): n equals a,t,g, or c
  misc feature (8): n equals a,t,g, or c
  misc feature (10): n equals a,t,g, or c
  misc feature (15): n equals a,t,g, or c
  misc feature (36): n equals a,t,g, or c
  misc feature (105): n equals a,t,g, or c
  misc feature (115): n equals a,t,g, or c
  misc feature (128): n equals a,t,g, or c
  misc feature (206): n equals a,t,g, or c
  misc feature (214): n equals a,t,g, or c
  misc feature (233): n equals a,t,g, or c
  misc feature (284): n equals a,t,g, or c
  misc feature (288): n equals a,t,g, or c
  misc feature (313): n equals a,t,g, or c
  misc feature (318): n equals a,t,g, or c
  misc feature (346): n equals a,t,g, or c
  misc feature (352): n equals a,t,g, or c
  misc feature (426): n equals a,t,g, or c
  misc feature (433): n equals a,t,g, or c
  misc feature (458): n equals a,t,g, or c
  misc feature (461): n equals a,t,g, or c
  misc feature (464): n equals a,t,g, or c
gcntcaanantgttnggacggaacaaatccggggantctcttccagcctccgaccgaccctccgatttcctctccgcttgcaacctccgggaccatcttctcggncatctcctgnttctgggacctgncaccaccgtttttgtggttagctccttcttgccaaccaaccatgagctcccagattcgtcagaattattccaccgacntggaggcnaccgtcaacagcctggtcnatttgtacctgcatgcctcctacacctacctctctctgggcttctatttcnaccncgatgatttggctctggaaagcgtnagccncttcttccacgaaactggccgaggagancgcganggctacgaacgtctcctgaatatgcaaaaccagcgtgggcggccgcgctctcttccaggaagtcaacaagcccncttaaanataattggggttaaaaccccaaaanccntgnaaacttgccattgccctgaaaataaaa

SEQ ID NO: 380 - DNA, 270 bp, Homo sapiens
  misc feature (4): n equals a,t,g, or c
  misc feature (15): n equals a,t,g, or c
  misc feature (35): n equals a,t,g, or c
  misc feature (56): n equals a,t,g, or c
  misc feature (63): n equals a,t,g, or c
  misc feature (87): n equals a,t,g, or c
  misc feature (107): n equals a,t,g, or c
  misc feature (108): n equals a,t,g, or c
  misc feature (119): n equals a,t,g, or c
  misc feature (138): n equals a,t,g, or c
  misc feature (182): n equals a,t,g, or c
  misc feature (199): n equals a,t,g, or c
  misc feature (202): n equals a,t,g, or c
  misc feature (207): n equals a,t,g, or c
  misc feature (213): n equals a,t,g, or c
  misc feature (214): n equals a,t,g, or c
  misc feature (222): n equals a,t,g, or c
  misc feature (230): n equals a,t,g, or c
  misc feature (233): n equals a,t,g, or c
  misc feature (266): n equals a,t,g, or c
aatncggcacgagtnactcaaaagcatctactccnaatggttatgataatggcatnatttggnccacttggaaaacccggtggtatnccatgaagaaaaccactatnnagataatcccnttcaacaggctcacaattngagaaggacagcaacaccacctagggggagccaaacaggctggngacgtttaaaagaccgnttncaaangaggtnnacttattntaaagggnctnatatatgaagcagaggaggtgataattagtttntcct

SEQ ID NO: 381 - DNA, 160 bp, Homo sapiens
  misc feature (46): n equals a,t,g, or c
  misc feature (136): n equals a,t,g, or c
  misc feature (139): n equals a,t,g, or c
  misc feature (141): n equals a,t,g, or c
  misc feature (154): n equals a,t,g, or c
  misc feature (158): n equals a,t,g, or c
gaagaaatcaaccttgctcctgacagctcatccgtggttgtatcangacttatggtggccaccaaatatgaagtgagtgtctatgctcttaaggacactttgacaagcagaccagctcagggagttgtcaccactntgnanaatgtcagcccancaanaa

SEQ ID NO: 382 - DNA, 617 bp, Homo sapiens
  misc feature (501): n equals a,t,g, or c
  misc feature (562): n equals a,t,g, or c
ggtcccgcttcacagacgacgacaagaccgaccacctgtcctgggagtggaatctcaccatcaagaaggactggaaggactgagcccagccagaggcgggcagggcagactgacggacggacgacggacaggcggatgtgtcccccccagcccctcccctccccataccaaagtgctgacaggccctccgtgcccctcccaccctggtccgcctccctggcctggctcaaccgagtgcctccgacccccctcctcagccctcccccacccacaggcccagcctcctcggtctcctgtctcgttgctgcttctgcctgtgctgtgggggagagaggccgcagccaggcctctgctgcctttctgtgccccccaggttctatctccccgtcacacccgaggcctggcttcaggagggagcggagcagcattctccaggcccccgttggttgccctggacgtgtgcgtctgtgttcgggtggactggggtgtgggatgcacggnctgtgggggccggccgtctcagcccgtgtcctgcagcccttgcgctgcggccgctaacatntgctacatggggtgacgggggctatagcttactctggtgatacatgggctccgcc

SEQ ID NO: 383 - DNA, 307 bp, Homo sapiens
  misc feature (148): n equals a,t,g, or c
gcggagcgtgcgggccctgctctgcaccctgcgcgcggtcccgttacccgccgcgccctgcccgccgaggccctggcagctgggggtgggcgccgtccgtacgctgcgcactggacccgctctgctctcggtgcgtaaattcacaganaaacacgaatgggttaacaacagaaaatggcattggaacagtgggaatccagcaattttgcacaggaagcgttgggaaattttgtttattgttatctccctgaaatttgggacaaaatttgaaacaaacaaattaattttgggttgcttttggagggtt

SEQ ID NO: 384 - DNA, 424 bp, Homo sapiens
  misc feature (290): n equals a,t,g, or c
  misc feature (384): n equals a,t,g, or c
  misc feature (385): n equals a,t,g, or c
  misc feature (392): n equals a,t,g, or c
  misc feature (394): n equals a,t,g, or c
  misc feature (407): n equals a,t,g, or c
ggcctcactcccgagctctactgactcccaacagagcgcccaagaagaaaatggccataagtggagtccctgtgctaggatttttcatcatagctgtgctgatgagcgctcaggaatcatgggctatcaaagaagaacatgtgatcatccaggccgagttctatctgaatcctgaccaatcaggcgagtttatgtttgactttgatggtgatgagattttccatgtggatatggcaaagaaggagacggtctggcggcttgaagaatttggacgatttgccagctttgangctcaaggtgcattggccaacatagctgtggacaaagccaacctggaaatcatgacaaagcgctccaactatactccgatcaccaatgtacctnnagaggtnanctgtgctcacgancagccctgtggaactga

SEQ ID NO: 385 - DNA, 352 bp, Homo sapiens
  misc feature (4): n equals a,t,g, or c
  misc feature (289): n equals a,t,g, or c
aggnaagatgaaaataaagtagatgggatgaatgccccaaaaggccaaactgggaactctagccgtggtccaggagacggagggaacagagaccactggaaggagtcagataggaaagatggcaaaaaggatcaagactccagatctgcacctgagccaaagaaacctgaggaaaatccagcttctaagttcagttctgcaagcaagtatgctgctctctctgttgatggtgaagatgaaaatgagggagaagattatgccgaatagacctctacatcctgtgcttttntcctagtttctctccaccctgggaacattcgagagcaaatcaaaacctctatccagacaagac

SEQ ID NO: 386 - DNA, 674 bp, Homo sapiens
  misc feature (412): n equals a,t,g, or c
  misc feature (504): n equals a,t,g, or c
  misc feature (511): n equals a,t,g, or c
  misc feature (528): n equals a,t,g, or c
  misc feature (548): n equals a,t,g, or c
  misc feature (555): n equals a,t,g, or c
  misc feature (569): n equals a,t,g, or c
  misc feature (589): n equals a,t,g, or c
  misc feature (617): n equals a,t,g, or c
  misc feature (631): n equals a,t,g, or c
  misc feature (666): n equals a,t,g, or c
  misc feature (672): n equals a,t,g, or c
gattctccctgggtacatcgacttcactgcagaccaggtggacctgacttctgctctgaccaagaaaatcactcttaagaccccactggtttcctctcccatggacacagtcacagaggctgggatggccatagcaatggcgcttacaggcggtattggcttcatccaccacaactgtacacctgaattccaggccaatgaagttcggaaagtgaagaaatatgaacagggattcatcacagaccctgtggtcctcagccccaaggatcgcgtgcgggatgtttttgaggccaaggcccggcatggtttctgcggtatcccaatcacagacacaggccggatggggagccgcttggtgggcatcatctcctccagggacattgattttctcaaagaggaggaacatgactgnttcttggaagagataatgacaaagagggaagacttggtggtagcccctgcaggcatcacactgaaggaggcaaatgaaattctgcagcgcancaagaanggaaaggtgcccattgnaaatgagatgatgagcttgngggcatnatggccggacaganctgaagaagaatcgggctanccactagcttcaaagatgccagaacaantgtgggtgggcaancatgggactatgggtgccagttaggtggcttgttnccaacntg

SEQ ID NO: 387 - DNA, 309 bp, Homo sapiens
  misc feature (14): n equals a,t,g, or c
  misc feature (24): n equals a,t,g, or c
  misc feature (25): n equals a,t,g, or c
  misc feature (188): n equals a,t,g, or c
  misc feature (200): n equals a,t,g, or c
  misc feature (288): n equals a,t,g, or c
  misc feature (290): n equals a,t,g, or c
  misc feature (291): n equals a,t,g, or c
  misc feature (304): n equals a,t,g, or c
  misc feature (309): n equals a,t,g, or c
tggaaattccccgnagacactatnntaaggtacgcctgcaggtaccggtccggaattcccgggtcgacccacgcgtccgcccacgcgtccggggcggctgagacgccgcctgcctggcacctaggagcgcagcggagccccgacaccgccgccgccgccatggagtccgagaccgaacccgagcccgncacgctcctggngaagagccccaaccagcgccaccgcgacttggagctgagtggcgaccgcggctggagtgtgggccacctcaaggcccacctgagccgngnntaccccgagcgtncgcgn

SEQ ID NO: 388 - DNA, 408 bp, Homo sapiens
  misc feature (15): n equals a,t,g, or c
  misc feature (215): n equals a,t,g, or c
  misc feature (322): n equals a,t,g, or c
  misc feature (370): n equals a,t,g, or c
  misc feature (382): n equals a,t,g, or c
  misc feature (385): n equals a,t,g, or c
  misc feature (403): n equals a,t,g, or c
gcgagagcgccaganagagaagatcggggggctgaaatccatcttcatcctaccgctccgcccgtgttggtggaatgagcgttgcatgtgtcttgaagagaaaagcagtgctttggcaggactctttcagcccccacctgaaacatcaccctcaagaaccagctaatcccaacatgcctgttgttttgacatctggaacagggtcgcaagcgcancacaaccagctgcaaatcaggctcttgcagctgggactcactccagccctgtcccaggatctataggagttgcaggccgttcccaggacgacgctatggtggactanttcttttcagaggcagcattggtgagcagcttggggggaagaaggaantggaagaaggcnggnattattaataagcaaacntcgat

SEQ ID NO: 389 - DNA, 601 bp, Homo sapiens
  misc feature (5): n equals a,t,g, or c
  misc feature (8): n equals a,t,g, or c
  misc feature (10): n equals a,t,g, or c
  misc feature (11): n equals a,t,g, or c
  misc feature (14): n equals a,t,g, or c
  misc feature (344): n equals a,t,g, or c
  misc feature (467): n equals a,t,g, or c
  misc feature (487): n equals a,t,g, or c
  misc feature (522): n equals a,t,g, or c
  misc feature (552): n equals a,t,g, or c
  misc feature (576): n equals a,t,g, or c
  misc feature (584): n equals a,t,g, or c
  misc feature (597): n equals a,t,g, or c
gcgancancnngcntaatcatggccattaggtgccattgtttctctgtggaggagtccatgacgaaagatgaactgattgcccgcctccgctcgctgggtgaacaactgaaccgtgatgtcagcctgacggggacgaaagaagaactggcgctccgtgtggcagagctgaaagaggagcttgatgacacgaggcctaagcttggcactggccgtcgttttacaacgtcgtgactgggaaaaccctggcgttacccaacttaatcgccttgcagcacatccccctttcgccagctggcgtaatagcgaagaggcccgcaccgatcgcccttcccaacagttgcgnagcctgaatggcgaatggcgcctgatgcggtattttctccttacgcatctgtgcggtatttcacaccgcatatggtgcactctcagtacaatctgctctgatgccgcatagttaagccagccncgacacccggcaacacccgntgacgcgccctgacgggcttgctgcttccggcatncgcttacagacaagctgtgaccgttccggnagctgcatgtgtcaaaaggttttnaccgtatnaccgaaacgcgcnaaac

SEQ ID NO: 390 - DNA, 407 bp, Homo sapiens
  misc feature (298): n equals a,t,g, or c
  misc feature (385): n equals a,t,g, or c
  misc feature (389): n equals a,t,g, or c
  misc feature (390): n equals a,t,g, or c
  misc feature (392): n equals a,t,g, or c
  misc feature (393): n equals a,t,g, or c
ggtgaccggggcccaggcctatgcctccaccgccaagtgcctgaacatctgggccctgattttgggcatcttcatgaccattctgctcatcatcatcccagtgttggtcgtccaggcccagcgatagatcaggaggcatcattgaggccaggagctctgcccgtgacctgtatcccacgtactctatcttccattcctcgccctgcccccagaggccaggagctctgcccttgacctgtattccacttactccaccttccattcctcgccctgtccccacagccgagtcctgcatcanccctttatcctcacacgcttttctacaatggcattcaataaagtgtatatgtttctggtgaaaaaaaaaaaaaaaaaaaaaaaaaanaaannannaaaaaaaaaaaaaa

SEQ ID NO: 391 - DNA, 566 bp, Homo sapiens
  misc feature (443): n equals a,t,g, or c
ttcaggtttattaatgccagaagaagaatagtacagcccatgattgaccagtcaaatcgagcagtgagccaaggagcagcatatagtccagagggtcagcccatggggagctttgtgttggatggtcagcaacacatggggatccggcctgcaggtttgcagagcatgccaggggactacgtttctcagggtggtcctatgggaatgagtatggcacagccaagttacactcctccccagatgaccccacaccctactcaattaagacatggacccccaatgcattcatatttgccaagccatccccaccacccagccatgatgatgcacggaggaccccctacccaccctggaatgactatgtcagcacagagccccacaatgttaaattctgtagatcccaatgttggcggacaggttatggacattcatgcccaatagtntaaggggactcaagggaaaagggaacacacgcaaaaactattttaagacttctggaactttgaccaggtgttgacacttaatatgaaattccagacagctgtgattatttttaactttggcat

SEQ ID NO: 392 - DNA, 425 bp, Homo sapiens
  misc feature (283): n equals a,t,g, or c
  misc feature (346): n equals a,t,g, or c
  misc feature (355): n equals a,t,g, or c
  misc feature (360): n equals a,t,g, or c
  misc feature (364): n equals a,t,g, or c
  misc feature (365): n equals a,t,g, or c
  misc feature (393): n equals a,t,g, or c
  misc feature (406): n equals a,t,g, or c
cccatctctgaccatgaggccaccctgaggtgctgggccctgggcttctaccctgcggagatcacactgacctggcagcgggatggggaggaccagacccaggacacggagctcgtggagaccaggcctgcaggggatggaaccttccagaagtgggcggctgtggtggtgccttctggagaggagcagagatacacctgccatgtgcagcatgagggtctgcccaagcccctcaccctgagatgggagctgtcttcccagcccaccatccccatcgtgggcntcattgctggcctggttctccttggactgtgatcactggagctgtggtccctgccctgatttngtaggaagnaaaanctcnntattgaaaaaggagggattttcactccntgctgctaagcanttgacaattgccccaaggg

SEQ ID NO: 393 - DNA, 443 bp, Homo sapiens
  misc feature (50): n equals a,t,g, or c
  misc feature (355): n equals a,t,g, or c
  misc feature (365): n equals a,t,g, or c
  misc feature (385): n equals a,t,g, or c
  misc feature (419): n equals a,t,g, or c
  misc feature (443): n equals a,t,g, or c
ctcgggctgggccttattatccatcacaagaagatgagccccagcacgangcctccaatgccactcagcatcttgctctgggcagattcagactgagcccgccactccacggtgatggggttctggaggctggggtgctccatgtggcaggtgtagacgtctccatgctggggagtcatttccagcatcaccaggatctggaaggtccagtcaccgttcctaataaggggggtggacacaacgccggttgtctcctcctggtcattccgaatctgcccagagcaagatgctgagtggcattggaggcttcgtgctggggtcatcttcctcgggctgggcttattatccatcacangatcagaaanggctcctgcactgactcctnagactattttaactgggattggtatcacttttcngtaagcctgcttgtccctgcccan

SEQ ID NO: 394 - DNA, 189 bp, Homo sapiens
  misc feature (3): n equals a,t,g, or c
  misc feature (19): n equals a,t,g, or c
  misc feature (44): n equals a,t,g, or c
  misc feature (65): n equals a,t,g, or c
  misc feature (75): n equals a,t,g, or c
  misc feature (80): n equals a,t,g, or c
  misc feature (84): n equals a,t,g, or c
  misc feature (110): n equals a,t,g, or c
  misc feature (137): n equals a,t,g, or c
  misc feature (140): n equals a,t,g, or c
  misc feature (142): n equals a,t,g, or c
  misc feature (148): n equals a,t,g, or c
  misc feature (177): n equals a,t,g, or c
  misc feature (182): n equals a,t,g, or c
ggnagaggtcatccctaancaccatcaactataatgagtttccnaccatggtgtttccttctggncagatcagcnagggntcgnccttggccccggcccctccccaagtncctgccccaggttccagcccctgcccntgntnccagcnatggtatcagctctggcccaggccccagnccctntgcccag

SEQ ID NO: 395 - DNA, 349 bp, Homo sapiens
  misc feature (286): n equals a,t,g, or c
  misc feature (299): n equals a,t,g, or c
  misc feature (315): n equals a,t,g, or c
  misc feature (335): n equals a,t,g, or c
  misc feature (337): n equals a,t,g, or c
gcacgagctgaccgccaagtatctcaactactatcgggggatgctggacgtcgcccatgagcaggtggacttcaaggacttctacccggccatagcagtgaatgatgtgcgccaggctgcccgcagcgccgccagctacatgctcttcgaccccaaggacagcgtcatgcagcagaacctggtgtattaccggttccaccgggctcgctggggcctggaagaggaggacttccagccccgggaggaggccatgctctaccacaaccagaccgccgagctgcgggantgctggagttcanccacatgtacctgcanttaagatgatgaaattggancngggaaggaaaca

SEQ ID NO: 396 - DNA, 304 bp, Homo sapiens
  misc feature (215): n equals a,t,g, or c
  misc feature (236): n equals a,t,g, or c
  misc feature (239): n equals a,t,g, or c
  misc feature (260): n equals a,t,g, or c
  misc feature (263): n equals a,t,g, or c
cctgacaggccctgggccaagcccgaggacccttctctcctggaggatcccaggatcaaggcgatcgcagccaagcacaataaaactacagcccaggtcctgatccggttccccatgcagaggaatgggggtggatccccaagtctgtgacaccagaacgcattgctgagaactttaaggtcttttgactttgaactgagcagccaggatatgancaccttactcagctacaacangantgaaggtcttgttgctgtttnagntgttcctcccacaaggattacccttcataaaaattttggaa

SEQ ID NO: 397 - DNA, 349 bp, Homo sapiens
  misc feature (128): n equals a,t,g, or c
  misc feature (161): n equals a,t,g, or c
  misc feature (285): n equals a,t,g, or c
  misc feature (288): n equals a,t,g, or c
  misc feature (315): n equals a,t,g, or c
  misc feature (318): n equals a,t,g, or c
  misc feature (345): n equals a,t,g, or c
tgtccaagggcatccgggacaacgagcggagtggccgggcccgagtgcacgtgtctgaggagggcactgagcccgaggcgatgctccaggtgctgggccccaagccggctctgcctgcaggtaccgangacaccgccaaggaggatgcggccaaccgcaanctggccaagctctacaaggtctccaatggtgcatggaccatgtccgtctccctcctggctgatgaaaacccttccgccaaggggcctgaaattcagaagactgcttcatcctggaccacgcaanatnggaaatctttgtcttgaaaggcaacangcnacacgaagaaaagaaaggtgcctccanacca

SEQ ID NO: 398 - DNA, 638 bp, Homo sapiens
  misc feature (11): n equals a,t,g, or c
  misc feature (12): n equals a,t,g, or c
  misc feature (20): n equals a,t,g, or c
  misc feature (21): n equals a,t,g, or c
  misc feature (37): n equals a,t,g, or c
  misc feature (302): n equals a,t,g, or c
  misc feature (391): n equals a,t,g, or c
  misc feature (445): n equals a,t,g, or c
  misc feature (495): n equals a,t,g, or c
  misc feature (515): n equals a,t,g, or c
  misc feature (523): n equals a,t,g, or c
  misc feature (540): n equals a,t,g, or c
  misc feature (543): n equals a,t,g, or c
  misc feature (560): n equals a,t,g, or c
  misc feature (563): n equals a,t,g, or c
  misc feature (578): n equals a,t,g, or c
  misc feature (624): n equals a,t,g, or c
  misc feature (636): n equals a,t,g, or c
tagcctcatannggacaaannggatcccgcgtgacgnccgtctaaatatggatccccggcgcagattcgcacagggagacaggactcgatgacagacaggcaggtctcgtgagggaacgggggccgggacttcgtaaggagagacctggccataagggacacctttgtgaatgcctctcggaccctgtacagcagcagccccagagtcctaagcaacaacagtgacgccaacttggagctcatcaacacctgggtggccaagaacaccaacaacaagatcagccggctgctagacagtctgncctccgatacccgccttgtcctcctcaatgctatcctacctgagtgccaagtggaagacaacatttgatcccaagaaaccagaatgganccctttcacttcaaaaactcagttataaagtgcccatgatgaatagcagaagtncctgtgggccatttcattgaccaactttgaagccaaggtggggagtgcantctccacaatctgagtttgngatctggnccccagacctgaaacancgnttttaaacatgggacanggnctagcccttctgttnaaaggcatcatggggaaactgggatgtccaagtccagccaaaagtngttacttcccgnat

SEQ ID NO: 399 - DNA, 245 bp, Homo sapiens
  misc feature (4): n equals a,t,g, or c
  misc feature (26): n equals a,t,g, or c
  misc feature (31): n equals a,t,g, or c
  misc feature (42): n equals a,t,g, or c
  misc feature (53): n equals a,t,g, or c
  misc feature (67): n equals a,t,g, or c
  misc feature (100): n equals a,t,g, or c
  misc feature (115): n equals a,t,g, or c
  misc feature (126): n equals a,t,g, or c
  misc feature (150): n equals a,t,g, or c
  misc feature (191): n equals a,t,g, or c
  misc feature (197): n equals a,t,g, or c
  misc feature (224): n equals a,t,g, or c
  misc feature (231): n equals a,t,g, or c
tggngaccaacatggccttttccccnttcancatcgccagcntccttacccangtcctgctcggggntggggataacaccaaaacaaacctggagagcancctctcttaccccanggacttcaccnatgtccaccaagccctgaagggcntcacaaccaaaggtgtcacctcagtctctcaaatcttccantgcccngaactggccataagggaccctttgtgnaatgccnctcggaccctgttc

SEQ ID NO: 400 - DNA, 364 bp, Homo sapiens
  misc feature (290): n equals a,t,g, or c
  misc feature (292): n equals a,t,g, or c
  misc feature (293): n equals a,t,g, or c
  misc feature (331): n equals a,t,g, or c
  misc feature (349): n equals a,t,g, or c
ggcacgagcaaggcccaggatggcaccttctccagcgtgctcacactgaccaacctcactgggctagacacgggagaatacttttgcacccacaatgactcccgtggactggagaccgatgagcggaaacggctctacatctttgtgccagaagctacatctgcaaaaccaccattggggacagggaggtggattctgatgcctactatgtctacagactccagggtgagccccctttctggcctgatgctcagcagagtgttcatccatcaacgtctctgtggaacgcntnnaggactgtggtccgccaggtggagaacatcaccttcangtgcattgtggatcgggnatgaggtgtcaattt

SEQ ID NO: 401 - DNA, 409 bp, Homo sapiens
  misc feature (3): n equals a,t,g, or c
  misc feature (35): n equals a,t,g, or c
  misc feature (379): n equals a,t,g, or c
  misc feature (391): n equals a,t,g, or c
  misc feature (405): n equals a,t,g, or c
ttnagagccggactaggaccagggccctgggcctntccacactccccatggagaagctggcggcctctacagagccccaagggcctcggccggtcctgggccgtgagagtgtccaggtgcccgatgaccaagactttcgcagcttccggtcagacgggctacctcatccagagcacagggcccaagagctgcgtcatcacctacctggcccaggtggaccccaaaggctccttacccaagtgggtggtgaataaatcttctcagttcctggctcccaaggccatgaagaagatgtacaaggcgtgcctcaagtaccccgagtggaaacagaagcacctgcctcacttcaagccgtggctgcacccggagcagagcccgntgccgagcctgncgctgcggagctgncggg

SEQ ID NO: 402 - DNA, 437 bp, Homo sapiens
  misc feature (432): n equals a,t,g, or c
cccaagcagctggaggctctgtgtgtgggagcagcgactggacccagagccatgtggctgtgccctctggccctcaacctcatcttgatggcagcctctggtgctgtgtgcgaagtgaaggacgtttgtgttggaagccctggtatccccggcactcctggatcccacggcctgccaggcagggacgggagagatggtgtcaaaggagaccctggccctccaggccccatgggtccacctggagaaatgccatgtcctcctggaaatgatgggctgcctggagcccctggtatccctggagagtgtggagagaagggggagcctggcgagaggggccctccagggcttccagctcatctagatgaggagctccaagccacactccacgactttagacatcaaatcctgcagacaaggggagccctcagtctncaggg

SEQ ID NO: 403 - DNA, 203 bp, Homo sapiens
  misc feature (143): n equals a,t,g, or c
  misc feature (152): n equals a,t,g, or c
  misc feature (161): n equals a,t,g, or c
  misc feature (163): n equals a,t,g, or c
  misc feature (182): n equals a,t,g, or c
cacaacacaggtgtcgtgaaaactacccctaaaagccaaaatgggaaaggaaaagactcatatcaacattgtcgtcattggacacgtaaattcgggcaagtccaccactactggccatcttatctatatatgcggtggcttcnacaaaaaancctttgaanantttgaaaaggaggctgctnatatgggaaagggctcctcca

SEQ ID NO: 404 - DNA, 383 bp, Homo sapiens
  misc feature (228): n equals a,t,g, or c
  misc feature (262): n equals a,t,g, or c
  misc feature (279): n equals a,t,g, or c
  misc feature (299): n equals a,t,g, or c
  misc feature (303): n equals a,t,g, or c
  misc feature (308): n equals a,t,g, or c
  misc feature (351): n equals a,t,g, or c
  misc feature (368): n equals a,t,g, or c
ggaccccgctgagtacaacctgcgctcgcgcaccgtgctgtgcgggacctgcgggcagcctgccgacaaggcatctgccagcggctcaggagcccagagcccccagaactgcagcatcatgtaatctgggacctgccaggcaggggtgggggtggaggcttcctgcgtcctcctcacctcatgcccaccccctgccctgcacgtcatgggagggggcttgaagccaangaaaaataaccctttggtttttttcttctgtatntttttttctaagagaantattttctacagtggttttnatantgaangaaaaacacaagcaaaaaaaaaaaaaaagggcggccgctctanaggatccaaagcttacntacgcgtgcatgcga

SEQ ID NO: 405 - DNA, 433 bp, Homo sapiens
  misc feature (21): n equals a,t,g, or c
  misc feature (23): n equals a,t,g, or c
  misc feature (25): n equals a,t,g, or c
  misc feature (172): n equals a,t,g, or c
  misc feature (173): n equals a,t,g, or c
  misc feature (208): n equals a,t,g, or c
  misc feature (268): n equals a,t,g, or c
  misc feature (298): n equals a,t,g, or c
  misc feature (384): n equals a,t,g, or c
  misc feature (405): n equals a,t,g, or c
  misc feature (406): n equals a,t,g, or c
  misc feature (416): n equals a,t,g, or c
  misc feature (428): n equals a,t,g, or c
ggcacgagctgatagctgtangngnctgaggcagccatgttccaccgcaagctgtttgaagaacttgtgcgagcctcaagtcactccacagacctcatggaagccatggccatgggcagcgtggaggcttcttattaagtgtttagcagcagctttgatagttctgacgganntgggcaggtctgctcaccaggtggccagataccgnccacgtgcccccatcattgctgtggacccgggaatccccagacagttcgtcaaggcccancttttaccgtgggcatctttccctgtgctnttgcaaggaccccattccaggaggccttggttttaggacgtgggaccttccggtggaacttttgccatgatttttgggaaaggccnagtttttttcaagaagggganntggtcaattngtttgaccgttngggcc

SEQ ID NO: 406 - DNA, 429 bp, Homo sapiens
  misc feature (391): n equals a,t,g, or c
  misc feature (399): n equals a,t,g, or c
  misc feature (406): n equals a,t,g, or c
  misc feature (426): n equals a,t,g, or c
  misc feature (428): n equals a,t,g, or c
ctacaaatttcatgagcactgtagccacaagtctgacatcgaaatccattgagaagaacttcaagtagatttcctggatcatgttcccctcacaacacacaactttgctcggaagacgttcctgaagcttgccttctgtgacatctgtcagaaattcctgctcaatggatttcgatgtcagacttgtggctacaaatttcatgagcactgtagcaccaaagtacctactatgtgtgtggactggagtaacatcagacaactcttattgtttccaaattccactattggtgatagtggagtcccagcactaccttctttgactatgcgtcgtatgcgagagtctgttccaaggatgcctgtaagttctcagcacagatattctacacctcangccttcanctttaanacctccagtccctcatctgnang

SEQ ID NO: 407 - DNA, 270 bp, Homo sapiens
  misc feature (56): n equals a,t,g, or c
  misc feature (74): n equals a,t,g, or c
  misc feature (134): n equals a,t,g, or c
  misc feature (146): n equals a,t,g, or c
  misc feature (148): n equals a,t,g, or c
  misc feature (207): n equals a,t,g, or c
  misc feature (215): n equals a,t,g, or c
  misc feature (220): n equals a,t,g, or c
  misc feature (221): n equals a,t,g, or c
  misc feature (251): n equals a,t,g, or c
cgccagaccgccgccgcgccgccatcatggacaccagccgtgtgcagcctatcaanctggccagggtcaccaangtcctgggcaggaccggttctcagggacagtgcacgcaggtaatcgggtgggggcatttngccgactgccgncnacctaaaccctgatgtgacctctaccctgccctaacccctgccagccggaatccggganccgattcncattnnatcacagggttctgatggttccctttaacnatctgtattctggccccga

SEQ ID NO: 408 - DNA, 655 bp, Homo sapiens
  misc feature (214): n equals a,t,g, or c
  misc feature (268): n equals a,t,g, or c
  misc feature (295): n equals a,t,g, or c
  misc feature (329): n equals a,t,g, or c
  misc feature (401): n equals a,t,g, or c
  misc feature (404): n equals a,t,g, or c
  misc feature (497): n equals a,t,g, or c
  misc feature (508): n equals a,t,g, or c
  misc feature (511): n equals a,t,g, or c
  misc feature (517): n equals a,t,g, or c
  misc feature (568): n equals a,t,g, or c
  misc feature (572): n equals a,t,g, or c
  misc feature (610): n equals a,t,g, or c
  misc feature (633): n equals a,t,g, or c
  misc feature (654): n equals a,t,g, or c
gcccacgcgtccgctccccgccccgcccctcgtctcctccaagatggcgagcggcggcagcgggggggtgtcagtacctgcgctgtggagtgaagtgaaccggtatggccagaacggcgacttcacgcgcgctctcaagaccgtcaataagatactacagatcaacaaagatgacgtaactgccctgcattgtaaagtggtatgccttatccanaatggaagtttcaaggaagctttgaatgtcatcaatactcacaccaaagtgttngccaataactctctctcctttgaaaangcatattgcgaatacaggctgaaacagaattganaatgccttgaaaaacaatagaaagtgcccacccagcagacagacaaactgaaaggaactttatggacaattnttnttccgtttgggaaagcttttaataaatgcttaacaatgttttaaaatttcttccgaaactcccccaataattttaataaggaaaaggaaaacnacctttccccnttnttgcantccaaacattggaaaattggtcccaaaaactggcccccaaaaggcattaantttntaaactttttttttttttggccggcccttaaccccctnaatccccaaattaaattttgccnccctttccaaaaattgggagna

SEQ ID NO: 409 - DNA, 376 bp, Homo sapiens
  misc feature (223): n equals a,t,g, or c
  misc feature (246): n equals a,t,g, or c
  misc feature (250): n equals a,t,g, or c
  misc feature (259): n equals a,t,g, or c
  misc feature (273): n equals a,t,g, or c
  misc feature (291): n equals a,t,g, or c
  misc feature (361): n equals a,t,g, or c
  misc feature (364): n equals a,t,g, or c
  misc feature (367): n equals a,t,g, or c
  misc feature (372): n equals a,t,g, or c
gcagctggaggctctgtgtgtgggtcgctgatttcttggagcctgaaaagaaggtaactgggcatatgagggacagatggagtgagtcagtgacaggagcagcgactggacccagagccatgtggctgtgccctctggccctcaacctcatcttgatggcagcctctggtgctgcgtgcgaagtgaaggacgtttgtgttggaagccctggtatccccggcantcctggatcccacggcctgccangcanggaaggganaaatggtgtcaaangagaccctggccctccanggcccatgggtccgccttgagaaacaacatgtcctcctgggaataatgggctgcttgagcccctggtgtnccnganaaacnttga

SEQ ID NO: 410 - DNA, 651 bp, Homo sapiens
  misc feature (582): n equals a,t,g, or c
  misc feature (624): n equals a,t,g, or c
  misc feature (643): n equals a,t,g, or c
  misc feature (646): n equals a,t,g, or c
  misc feature (650): n equals a,t,g, or c
gaacctgatggggagatatggggacaataaccacagtcagggcgttaactggttccactggaagggccacgaacactcaatccagtttgctgagatgaagctgagaccaagcaacttcagaaatcttgaaggcaggcgcaaacgggcataaattccagggaccactgggtgagagaggaataaggcccagagcgaggaaaggattttaccaaagcatcaatacaaccagcccaaccatcggtccacacctgggcatttggtgagagtcaaagctgaccatggatccctggggccaacggcaacagcatgggcctcacctcctctgtgatttctttctttgcaccaaagacatcagtctccaacatgtttctgttttggtggttgattcagcaaaaatctccagtgacaacatcgcaatagttttttacttctcttaggtggctctgggaatgggagaagggtaggatgtcaggggtagtttggtttagaaccagccgtatttacatgaactggataattaatggcattattttggtagcaaagattaaaggggcattggaagccatcccttttttacatttnatccacagaaaccagaaaagcaatactggttccatttaaggntatgattaatatattaatntantaang

SEQ ID NO: 411 - DNA, 392 bp, Homo sapiens
  misc feature (199): n equals a,t,g, or c
  misc feature (210): n equals a,t,g, or c
  misc feature (220): n equals a,t,g, or c
  misc feature (354): n equals a,t,g, or c
  misc feature (355): n equals a,t,g, or c
  misc feature (385): n equals a,t,g, or c
  misc feature (388): n equals a,t,g, or c
  misc feature (391): n equals a,t,g, or c
ggttatccgcgatgcgtttcctggcagctacattcctgctcctggcgctcagcaccgctgcccaggccgaaccggtgcagttcaaggactgcggttctgtggatggagttataaaggaagtgaatgtgagcccatgccccacccaaccctgccagctgagcaaaggacagtcttacagcgtcaatgtcaccttcaccancaatattcaanctaaaagcancaaggccgtggtgcatggcatcctgatgggcgtcccagttccctttcccattcctgagcctgatggttgtaagagtggaattaactgccctatccaaaaagacaagacctatagctacctgaataaactaccanngaaaagcgaatatccctctataaaactggnggnggna

SEQ ID NO: 412 - DNA, 645 bp, Homo sapiens
  misc feature (443): n equals a,t,g, or c
  misc feature (477): n equals a,t,g, or c
  misc feature (505): n equals a,t,g, or c
  misc feature (556): n equals a,t,g, or c
  misc feature (567): n equals a,t,g, or c
  misc feature (611): n equals a,t,g, or c
gatttatcttcacaaagtggctccaggatgtatttaacgtgcccttggtcatccagatgacggatgacgagaagtatctgtggaaggacctgaccctggaccaggcctatagctatgctgtggagaatgccaaggacatcatcgcctgtggctttgacatcaacaagactttcatattctctgacctggactacatggggatgagctcaggtttctacaaaaatgtggtgaagattcaaaagcatgttaccttcaaccaagtgaaaggcattttcggcttcactgacagcgactgcattgggaagatcagttttcctgccatccaggctgctccctccttcagcaactcattcccacagatcttccgagacaggacggatatccagtgccttatcccatgtgccattgaccaggatccttactttagaatgacaagggacgtngcccccaggatcggctatcctaaaccagccctgntgactccaccttcttcccagccctgcanggcgcccagaccaaaatgagtgccagcgaccccaactcctccatcttcctnaccgacacggncaagcagatcaaaaccaaggtcaataagcatgcgttttctgganggagagacaccatcgaggagcacaggcagtttgg

SEQ ID NO: 413 - DNA, 540 bp, Homo sapiens
  misc feature (5): n equals a,t,g, or c
  misc feature (7): n equals a,t,g, or c
  misc feature (9): n equals a,t,g, or c
  misc feature (186): n equals a,t,g, or c
  misc feature (240): n equals a,t,g, or c
  misc feature (357): n equals a,t,g, or c
  misc feature (370): n equals a,t,g, or c
  misc feature (374): n equals a,t,g, or c
  misc feature (385): n equals a,t,g, or c
  misc feature (386): n equals a,t,g, or c
  misc feature (396): n equals a,t,g, or c
  misc feature (408): n equals a,t,g, or c
  misc feature (417): n equals a,t,g, or c
  misc feature (443): n equals a,t,g, or c
  misc feature (445): n equals a,t,g, or c
  misc feature (461): n equals a,t,g, or c
  misc feature (479): n equals a,t,g, or c
  misc feature (480): n equals a,t,g, or c
  misc feature (496): n equals a,t,g, or c
  misc feature (533): n equals a,t,g, or c
ctcgngnanggttcggagtcccgattttctcctgctgctgtggcccggacatggcgactcccggccctgtgattccggagtcccctttgaaccatcgaagcctccagtcattgaggggctgagcccactgtttacaggaatccagagagtttcaaggaaaagttcgttcgcaagacccgcgagaanccggtggtacccataggttgcctggccacggcggccgccctcacctacggcctntactccttccaccgggggcaacagccagcgctcttcagctcatgatgcgcacccggatcgccgcccaggtttcaaggttcgcagccatcttgctgggtctgggtgttcatgctatgnaattttcgaaccntaanccaggtttggnnttgaaaagtncgcagaaatggnttccaaaanccagggagcaaacaatgggccctacntngggatttattccctcntttcttttgaaaggcccnnttttcgttggggaagnaattgaacctttgtgtaatgttaacgaaaattttttnaaaatcc

SEQ ID NO: 414 - DNA, 90 bp, Homo sapiens
  misc feature (8): n equals a,t,g, or c
  misc feature (10): n equals a,t,g, or c
  misc feature (66): n equals a,t,g, or c
  misc feature (79): n equals a,t,g, or c
  misc feature (88): n equals a,t,g, or c
ctcgtcgntncgagtttttttttttttttttttttttttttttttttttttttttttaaaaaaaanaaaaaaaaaaaanggggaaaangg

SEQ ID NO: 415 - DNA, 461 bp, Homo sapiens
  misc feature (298): n equals a,t,g, or c
  misc feature (327): n equals a,t,g, or c
  misc feature (335): n equals a,t,g, or c
  misc feature (402): n equals a,t,g, or c
  misc feature (422): n equals a,t,g, or c
  misc feature (427): n equals a,t,g, or c
  misc feature (430): n equals a,t,g, or c
  misc feature (433): n equals a,t,g, or c
gaagctgggggtagggtgggggtggggagaacacttaacaacatggggaccagtcaggggaatccccttatttctgttttgcatatgaggaaccctagagcagccaggtgaggctctctagtttaataaaaatcatggaaagactcttaatgcagactcttcttaagtgttaatagggattttttcagcttattttggttgcagtttccaatttttaaaaatgttggaggtaatctttcccaccttcccaaaccttaattcttggtagatggcattagtgttggaaccaatgctttcntcatgtcttcaattctttggtatatggcnttcctttncagatgtatttaaacaaacaaaaaccctttaaaaaaaaaaaaaaaaacccgggggggggggcccggnaacccattccccccaaaagnggagnggnatnacattcacgggccggggtttaacagtgt

SEQ ID NO: 416 - DNA, 289 bp, Homo sapiens
  misc feature (4): n equals a,t,g, or c
  misc feature (5): n equals a,t,g, or c
  misc feature (7): n equals a,t,g, or c
  misc feature (9): n equals a,t,g, or c
  misc feature (11): n equals a,t,g, or c
  misc feature (15): n equals a,t,g, or c
  misc feature (26): n equals a,t,g, or c
  misc feature (31): n equals a,t,g, or c
  misc feature (34): n equals a,t,g, or c
  misc feature (36): n equals a,t,g, or c
  misc feature (38): n equals a,t,g, or c
  misc feature (40): n equals a,t,g, or c
  misc feature (54): n equals a,t,g, or c
  misc feature (60): n equals a,t,g, or c
  misc feature (97): n equals a,t,g, or c
  misc feature (105): n equals a,t,g, or c
  misc feature (122): n equals a,t,g, or c
  misc feature (155): n equals a,t,g, or c
  misc feature (220): n equals a,t,g, or c
  misc feature (234): n equals a,t,g, or c
  misc feature (246): n equals a,t,g, or c
  misc feature (271): n equals a,t,g, or c
  misc feature (278): n equals a,t,g, or c
caannantncnttantaaccccaatngtaanccnanananggcatgctcataanggaaanggtaaaaaaagtaaaagggaactcgggcaaatcttancccgcctntttaccaaaaacatcanctctagcatcaccagtattagaggcaccggctngcccagtggacacatgtttaacgggccgcgggtaccctaaccgtggcaaaggttagcataatcantgttccttaattangggacctgtatngaatggcttccacgagggtttcagncgtctcnttactttttaa

SEQ ID NO: 417 - DNA, 146 bp, Homo sapiens
  misc feature (2): n equals a,t,g, or c
  misc feature (12): n equals a,t,g, or c
  misc feature (18): n equals a,t,g, or c
  misc feature (32): n equals a,t,g, or c
  misc feature (83): n equals a,t,g, or c
  misc feature (104): n equals a,t,g, or c
  misc feature (110): n equals a,t,g, or c
  misc feature (123): n equals a,t,g, or c
  misc feature (140): n equals a,t,g, or c
gnagctttaggnaaccgntttggtgctggtcntggtaggcggctatggttttggaaggtggtgccggtagtggatttggtttnggccggtggagtggtggtggntttggncttggtggcggantgtgttttggaggtggnttcggt

SEQ ID NO: 418 - DNA, 400 bp, Homo sapiens
  misc feature (17): n equals a,t,g, or c
  misc feature (41): n equals a,t,g, or c
  misc feature (59): n equals a,t,g, or c
  misc feature (71): n equals a,t,g, or c
  misc feature (76): n equals a,t,g, or c
  misc feature (106): n equals a,t,g, or c
  misc feature (146): n equals a,t,g, or c
  misc feature (161): n equals a,t,g, or c
  misc feature (162): n equals a,t,g, or c
  misc feature (165): n equals a,t,g, or c
  misc feature (169): n equals a,t,g, or c
  misc feature (220): n equals a,t,g, or c
  misc feature (223): n equals a,t,g, or c
  misc feature (228): n equals a,t,g, or c
  misc feature (235): n equals a,t,g, or c
  misc feature (237): n equals a,t,g, or c
  misc feature (239): n equals a,t,g, or c
  misc feature (336): n equals a,t,g, or c
  misc feature (356): n equals a,t,g, or c
  misc feature (368): n equals a,t,g, or c
  misc feature (381): n equals a,t,g, or c
  misc feature (399): n equals a,t,g, or c
gggacattttgcaactntgggattggtgcttaactgtctantattgccatgtgaatgtngtatacgattgnaaggnttatgtcactaaagatttttattctgattntttcataatcaaaggtcatatgagactggtagagacaagntttgtagtgaagtanngtngcantaatttctgtacctgatcaagtttattgcagcctttcttttcctatttctnttntttangggttantntnaacaaatggcaatgagtagaaaagttaacatgaagattttagaaggagagaacttacatgacacagatttgtgagtctgtgactgtgacactattgnatgtgattgtaaaagctttnattgagcattgncaaatttgtaagnttcatagggatggacatna

SEQ ID NO: 419 - DNA, 282 bp, Homo sapiens
  misc feature (13): n equals a,t,g, or c
  misc feature (156): n equals a,t,g, or c
  misc feature (184): n equals a,t,g, or c
  misc feature (203): n equals a,t,g, or c
ccccttgcaaacnctcccagcactgcaccccaggcagccactcttagccttggccttcgacatgagatggagccctccttattccccatcaggatgagcaatcctggccaagcataatgacagagagaggcagacttcggggaagccctgactgtncagagctaaggacacagtggagattctntggcactctgaggtctctntggcaggcctggtcaggctctccatgaggttagaaggccaggtagtgttccagcagggtggtggccaagccaaccccat

SEQ ID NO: 420 - DNA, 508 bp, Homo sapiens
  misc feature (67): n equals a,t,g, or c
  misc feature (277): n equals a,t,g, or c
  misc feature (306): n equals a,t,g, or c
  misc feature (311): n equals a,t,g, or c
  misc feature (351): n equals a,t,g, or c
  misc feature (383): n equals a,t,g, or c
  misc feature (386): n equals a,t,g, or c
  misc feature (406): n equals a,t,g, or c
  misc feature (413): n equals a,t,g, or c
  misc feature (414): n equals a,t,g, or c
  misc feature (415): n equals a,t,g, or c
  misc feature (439): n equals a,t,g, or c
  misc feature (451): n equals a,t,g, or c
  misc feature (484): n equals a,t,g, or c
  misc feature (485): n equals a,t,g, or c
  misc feature (490): n equals a,t,g, or c
aattcggcacgagcagatgggcagtggaatgacaggaactgcctgtactcccgactgaccatctgtnagttctgagaggcatttaggccatgggacagggaggacgctctctggccttcggctccatcctgaggctccacttggtctgtgagatgctagaactccctttcaacagaattcacttgtggctattgggactggaggcacccttagccacttcattcctctgatgggccctgactcttccccataatcactgaccagccttgacactccnttgcaaattttccagcactgaacccaggnagcantcttagccttggcttcgacatgagatggagcctcttattnccatctggtccagttccttaattacagatggnagnattagggtttgggtagaagncctcaannnaaaaaagggctgcttctggtcctnagttttttttgnaaccagtgcattaggtggaatctggcagatatnnagagngagatttggggagcttat

SEQ ID NO: 421 - DNA, 236 bp, Homo sapiens
  misc feature (9): n equals a,t,g, or c
  misc feature (13): n equals a,t,g, or c
  misc feature (14): n equals a,t,g, or c
  misc feature (34): n equals a,t,g, or c
  misc feature (42): n equals a,t,g, or c
  misc feature (49): n equals a,t,g, or c
  misc feature (55): n equals a,t,g, or c
  misc feature (82): n equals a,t,g, or c
  misc feature (88): n equals a,t,g, or c
  misc feature (89): n equals a,t,g, or c
  misc feature (90): n equals a,t,g, or c
  misc feature (103): n equals a,t,g, or c
  misc feature (105): n equals a,t,g, or c
  misc feature (132): n equals a,t,g, or c
  misc feature (133): n equals a,t,g, or c
  misc feature (138): n equals a,t,g, or c
  misc feature (149): n equals a,t,g, or c
  misc feature (155): n equals a,t,g, or c
  misc feature (176): n equals a,t,g, or c
  misc feature (177): n equals a,t,g, or c
  misc feature (182): n equals a,t,g, or c
  misc feature (192): n equals a,t,g, or c
  misc feature (205): n equals a,t,g, or c
  misc feature (233): n equals a,t,g, or c
taattcggnacanncagagacccaagcagctggngggtcggntgtgtgngagcantgatttcttggagcctgaaaagaagcnggagcnnngactggtacccananccatgtggctgtgccctgctggccctnnaaccncatcttgtatnggcagnttctggtgctgcgtgcgaatnnaaggnacgtttggtnttggaagccctgntatccccggcactcctggatcccacggnctg

SEQ ID NO: 422 - DNA, 381 bp, Homo sapiens
  misc feature (10): n equals a,t,g, or c
  misc feature (60): n equals a,t,g, or c
  misc feature (62): n equals a,t,g, or c
  misc feature (239): n equals a,t,g, or c
  misc feature (241): n equals a,t,g, or c
  misc feature (268): n equals a,t,g, or c
  misc feature (271): n equals a,t,g, or c
  misc feature (275): n equals a,t,g, or c
  misc feature (288): n equals a,t,g, or c
  misc feature (305): n equals a,t,g, or c
  misc feature (312): n equals a,t,g, or c
  misc feature (328): n equals a,t,g, or c
  misc feature (332): n equals a,t,g, or c
  misc feature (339): n equals a,t,g, or c
  misc feature (344): n equals a,t,g, or c
  misc feature (348): n equals a,t,g, or c
  misc feature (356): n equals a,t,g, or c
  misc feature (361): n equals a,t,g, or c
  misc feature (364): n equals a,t,g, or c
aattcggcanagggcctctgagcccaagctaagccatcatatcccctgtgccctgcaggnantacacccagatggcctgaagcaactgaagatccacaaaagaagtgaaaatagccagttcctgccttaactgatgacattccaccattgtgaatttgttcctgccccaccctaactgatcaattgaccttgtggacaatacaccttccccacccttgagaaggtgctttgtaatattntncccacccaccccacgggccgaaccccnggnaccntttgaggaaggtnttttggtaatattgctntgcgggnattggaggaatgtggntttngtaaagnttgcnagcncgttgggnccacnaanaattgggttggttaaat

SEQ ID NO: 423 - DNA, 429 bp, Homo sapiens
  misc feature (118): n equals a,t,g, or c
cttgaatttcctatgtatttttattgtggtgttttaaatatggggaggggtattgagcattttttagggagaaaaataaatatatgctgtagtggccacaaataggcctatgatttanctggcaggccaggttttctcaagagcaaaatcaccctctggccccttggcaggtaaggcctcccggtcagcattatcctgccagacctcggggaggatacctgggagacagaagcctctgcacctactgtgcagaactctccacttccccaaccctccccaggtgggcagggcggagggagcctcagcctccttagactgacccctcaggcccctaggctggggggttgtaaataacagcagtcaggttgtttaccagccctttgcacctccccaggcagagggagcctctgttctggtgggggccacctc

SEQ ID NO: 424 - DNA, 441 bp, Homo sapiens
  misc feature (182): n equals a,t,g, or c
  misc feature (196): n equals a,t,g, or c
  misc feature (232): n equals a,t,g, or c
  misc feature (247): n equals a,t,g, or c
  misc feature (254): n equals a,t,g, or c
  misc feature (276): n equals a,t,g, or c
  misc feature (297): n equals a,t,g, or c
  misc feature (299): n equals a,t,g, or c
  misc feature (312): n equals a,t,g, or c
  misc feature (313): n equals a,t,g, or c
  misc feature (319): n equals a,t,g, or c
  misc feature (331): n equals a,t,g, or c
  misc feature (332): n equals a,t,g, or c
  misc feature (422): n equals a,t,g, or c
  misc feature (425): n equals a,t,g, or c
  misc feature (426): n equals a,t,g, or c
ccacagggaccagtttaatgtgtccttgccccagtgatgacagctggggatctgggggtggggagtcacccaggacccgggcagtcgcctttccccagctcctaaggctcccggccttccctgctgaaacagcaagaccagtgggttggcgtgggaggcctgggcttcaaaccacctctgcnatcacctggctgtnggtccccaagcaggacatacacacagtccctctctngccctcatcctcctncaagtgnaaaggaaaagccaagttaaaanggctcttgggaccatggttancnagctttttccctnnaccctnggccttgccaanngccaggttaaaaaaaacttaagttccaaaacggccttttaacgccttcctcggaaatacttccactggtggaccaagggccccagcctgngtnngcttgtttgtttaaa

SEQ ID NO: 425 - DNA, 419 bp, Homo sapiens
  misc feature (7): n equals a,t,g, or c
  misc feature (68): n equals a,t,g, or c
  misc feature (184): n equals a,t,g, or c
  misc feature (336): n equals a,t,g, or c
  misc feature (350): n equals a,t,g, or c
  misc feature (368): n equals a,t,g, or c
  misc feature (385): n equals a,t,g, or c
  misc feature (417): n equals a,t,g, or c
cccacgngttcgagacaggaaaaaaagcaacttttccaacatacaatttacttttaataaagtatgantatttcattttgagaacattccctggaattgccacataattcattaaaaacatttttttaagcaacacttgggaacagtgtttactttaaatccttaatggccttaattaattctnagattcctgccccatcacttacagaaccaattcactttagagtgactaaaaggaaacgatagcctagctttctaaagccacgctgtgtccctcaattacagagggtaggaatgggtataactcttaactgtggcaaagcagagtggaaattncaatttcataggantaaacaactgctgggggnatattccgtgcccaggnaaagggaaaattttctgggcaaatattttgtnca

SEQ ID NO: 426 - DNA, 407 bp, Homo sapiens
  misc feature (229): n equals a,t,g, or c
  misc feature (240): n equals a,t,g, or c
  misc feature (336): n equals a,t,g, or c
  misc feature (357): n equals a,t,g, or c
  misc feature (400): n equals a,t,g, or c
  misc feature (406): n equals a,t,g, or c
  misc feature (407): n equals a,t,g, or c
gcttactaccagacaaccttagccaaaccatttacccaaataaagtataggcgatagaaattgaaacctggcgcaatagatatagtaccgcaagggaaagatgaaaaattataaccaagcataatatagcaaggactaacccctataccttctgcataatgaattaactagaaataactttgcaaggagagccaaagctaagacccccgaaaccagacgagctacctgngaaacagctgnaagagcacacccgtctatgtagcaaaatagtgggaagatttataggttgaggcgacaaacctaccgagcctggtgatagctggttgtccaagatanaatcttagttcactttaaatntgcccacagaaccctctaaatccccttgtaaatttaactgttnaaaaann

SEQ ID NO: 427 - DNA, 423 bp, Homo sapiens
  misc feature (315): n equals a,t,g, or c
  misc feature (344): n equals a,t,g, or c
  misc feature (356): n equals a,t,g, or c
  misc feature (358): n equals a,t,g, or c
  misc feature (364): n equals a,t,g, or c
  misc feature (422): n equals a,t,g, or c
acccacgcgtccgctcaagtatagtgagaactcaatcttgaataacatttagaaagaatctcgctatacttgagactagatgacaaataaatgttattcaagattgagttctcactagtgtttttttaatcctaaaaaagtaatgttttgattttgtgacagtcaaaaggacgtgcaaaagtctagccttgcccgagctttccttacaatcagagcccctctcaccttgtaaagtgtgaatcgcccttcccttttgtacagaagatgaactgtattttgcattttgtctacttgtaagtgaatgtaacatactgncaattttccttgtttgaatatagaatggnaacactacacgngnacattnccagagcctggggtatattgccaatgaactttttgcaagcacacttgtaaccaaatgng

SEQ ID NO: 428 - DNA, 378 bp, Homo sapiens
  misc feature (14): n equals a,t,g, or c
  misc feature (338): n equals a,t,g, or c
gcggaggtttcagngtagaaggtgatgtcagctccagctcccctctgtcggtggtggggcctcaccttgaagagggaagtctcaatattaggctaagctatttgggaaagttctccccaccgcccctgtacgcgtcatcctagccccccttaggaaaggagttagggtctcagtgcctccagccacaccccctgccttccccagcttgcccatttccctgccccaaggcccagagctccccccagactggagagcaagcccagcccagcctcggcatagacccccttctggtccgcccgtggctcgattcccgggattcattcctcagcctctgcttntcccttttatcccaataagttattgctactgctgtgaagg

SEQ ID NO: 429 - DNA, 92 bp, Homo sapiens
  misc feature (23): n equals a,t,g, or c
  misc feature (70): n equals a,t,g, or c
  misc feature (75): n equals a,t,g, or c
  misc feature (76): n equals a,t,g, or c
  misc feature (77): n equals a,t,g, or c
ggcacagtggcagtgtagcgagnaaaggttttcgcctcctgtttcagcggtgacggctcttgggttttcncgggnnngctttttaattttag

SEQ ID NO: 430 - DNA, 410 bp, Homo sapiens
  misc feature (343): n equals a,t,g, or c
  misc feature (368): n equals a,t,g, or c
gcaaaaccttaaatctccaggctttttaaagcacaaaatataaataaaagctgggaaagtaaaccaaaattcttcagattgttcctcatgaatatcccccttcctctgcaattctccagagtggtaacagatgggtagaggcagctcaggtgaattacccagcttgcctctcaattcattcctcctcttcctctcaaaggctgaaggcagggcctttccagtcctcacaacctgtccttcacctagtccctcctgacccagggatggaggctttgagtcccacagtgtggtgatacagagcactagttgtcactgcctggctttatttaaaggaatgcagtangcttcctctgtagagctctgaaaangttgactatatagaagtcttgtatgtttttacttgggtaaga

SEQ ID NO: 431 - DNA, 611 bp, Homo sapiens
  misc feature (285): n equals a,t,g, or c
  misc feature (327): n equals a,t,g, or c
  misc feature (349): n equals a,t,g, or c
  misc feature (396): n equals a,t,g, or c
  misc feature (400): n equals a,t,g, or c
  misc feature (472): n equals a,t,g, or c
  misc feature (483): n equals a,t,g, or c
  misc feature (494): n equals a,t,g, or c
  misc feature (525): n equals a,t,g, or c
  misc feature (536): n equals a,t,g, or c
  misc feature (563): n equals a,t,g, or c
  misc feature (583): n equals a,t,g, or c
  misc feature (605): n equals a,t,g, or c
gcaaacagataacagaagatacagttgagtttggctcttagagaaatctggagaactatacctgcttcagtgaaataattacagaatatacttagaaaggcaaagtacattgtaaaataaagttgagcttagttttttttaaaaaaaaaaacaaagcaacaaattaactagatacagaataatggagaacaagttgttaaaacatttaatattatataggatattgctaattgtgtatatgttggtttaattaataatatgtactaagaatgtccttattcttgnggttaaaaacctgcctaaattaaattgggcttcaatcactgnaacctgattcatcctgggatgnaaaccattcgaagtcagctaattggacttttatggctctatcttttncttnagtgaagaaccctatttaaaactgggtcatcaattggctggtctaacaaggatagtcttcaggttcaatttnctgggccctgnggtaagttggnaacaaatcataatggattaattaaaaggttnaccatcattgnattacagcggttattataccggggcanaattctttacttgccccagnaatcctaattccttgggggggncttgga

SEQ ID NO: 432 - DNA, 291 bp, Homo sapiens
  misc feature (226): n equals a,t,g, or c
  misc feature (258): n equals a,t,g, or c
  misc feature (266): n equals a,t,g, or c
  misc feature (280): n equals a,t,g, or c
  misc feature (287): n equals a,t,g, or c
ggcagagtttttacagcaaaaactgctcaaagccatttaaattatatcctcattttaaaagttacatttgcaaatatttctccctatgaataatgtagtcgatagtgtgcactctttctctctctctctctctctctcacacacacacacacacacacacacacacacacacagacacggcaccattctgcctggggcactggaacacattcctgggggtcaccgntggtcagagtcactaggaggttacctgagtancttggggnggcctaatgtctcntgggggntttt

SEQ ID NO: 433 - DNA, 124 bp, Homo sapiens
  misc feature (112): n equals a,t,g, or c
  misc feature (114): n equals a,t,g, or c
  misc feature (119): n equals a,t,g, or c
  misc feature (121): n equals a,t,g, or c
  misc feature (122): n equals a,t,g, or c
ctcgtgccgaattcggcacgaggagagagagagagagagagagagagagagagagagagagagagagagagagagagagagagagagagagagagagagagagagagagagngngggcnannag

SEQ ID NO: 434 - DNA, 382 bp, Homo sapiens
  misc feature (67): n equals a,t,g, or c
  misc feature (86): n equals a,t,g, or c
  misc feature (106): n equals a,t,g, or c
  misc feature (116): n equals a,t,g, or c
  misc feature (122): n equals a,t,g, or c
  misc feature (172): n equals a,t,g, or c
  misc feature (191): n equals a,t,g, or c
  misc feature (228): n equals a,t,g, or c
  misc feature (254): n equals a,t,g, or c
  misc feature (267): n equals a,t,g, or c
  misc feature (269): n equals a,t,g, or c
  misc feature (299): n equals a,t,g, or c
  misc feature (321): n equals a,t,g, or c
  misc feature (328): n equals a,t,g, or c
  misc feature (341): n equals a,t,g, or c
  misc feature (373): n equals a,t,g, or c
cgcgtccgcttgttttaaaaaaatgcacaatttacttcccaaaaaagttgttacttgccttttcaanttgttgacaaacacacatntgatattctcttatatgttntagtaatgtnacgtanaaactcaagcctttttattctttgtgattaaatcctgttttaaaatgtcncaaaacaggaaccagcatnctaattggatttactatatcgagatatggttcaaatnggactactaaaattcattgaacactnaaactatgaaacnantactttttatattagtgaagacatgggatntaacttatggaaaatccaagtngcagganagtaatttttgtntacttttttaaccagactggaatgggtgaagnactagtgcg

SEQ ID NO: 435 - DNA, 323 bp, Homo sapiens
  misc feature (200): n equals a,t,g, or c
  misc feature (209): n equals a,t,g, or c
  misc feature (249): n equals a,t,g, or c
  misc feature (270): n equals a,t,g, or c
  misc feature (271): n equals a,t,g, or c
  misc feature (292): n equals a,t,g, or c
  misc feature (323): n equals a,t,g, or c
gccgaggtccccgcgccagagacgcagccgcgctcccaccacccacacccaccgcgccctcgttcgcctcttctccgggagccagtccgcgccaccgccgccgcccaggccatcgccaccctccgcagccatgtccaccaggtccgtgtcctcgtcctcctaccgcaggatgttcggcggcccgggcaccgcgagccggncgagctcancgggagctacgtgactacgtcacccgcacctacagcctgngcagcgcgctgagccccaacnncagccgcacctctaccctcgntcccgggcggcgtgtatgccacgcgctcctn

SEQ ID NO: 436 - DNA, 503 bp, Homo sapiens
  misc feature (313): n equals a,t,g, or c
  misc feature (403): n equals a,t,g, or c
  misc feature (452): n equals a,t,g, or c
  misc feature (457): n equals a,t,g, or c
  misc feature (469): n equals a,t,g, or c
  misc feature (483): n equals a,t,g, or c
  misc feature (493): n equals a,t,g, or c
gaattttgaatgtatttttaaatttattttttcaaaataatgacattagtaaaaattttacatagcctgtattgaattcacacattcaaatgaggctttaccagtaatgatggggattaatacagagctagtgtttggcatttgactttatctcaaatgagctaactgctcaatgaattacagaagactcatactctttttattttttcctggaaattaaaaaagaaaagctttactaaatattgacatatatatttactccaaattttacatttagtgaaataagaatatctctagtagctcagttaacatncaaccaggaaagcttcaaaaagatgattctgaaaatggcaggcaaaatttctttttattgtaggcaattcttaaactggaaatttggctntatgcataataagtcatgtgggtaaaacatccaccttgcagttagggtnccagnatcctaaccttnctaatttatttctnttaggccaantggaccattt

SEQ ID NO: 437 - DNA, 77 bp, Homo sapiens
  misc feature (27): n equals a,t,g, or c
  misc feature (70): n equals a,t,g, or c
  misc feature (71): n equals a,t,g, or c
  misc feature (73): n equals a,t,g, or c
  misc feature (77): n equals a,t,g, or c
ggcacgaggagagagagagagagaganagagagagagagagagagagagagagagagagagagagagagnntncgcn

SEQ ID NO: 438 - DNA, 424 bp, Homo sapiens
  misc feature (281): n equals a,t,g, or c
  misc feature (288): n equals a,t,g, or c
  misc feature (373): n equals a,t,g, or c
  misc feature (374): n equals a,t,g, or c
  misc feature (387): n equals a,t,g, or c
  misc feature (392): n equals a,t,g, or c
  misc feature (394): n equals a,t,g, or c
  misc feature (402): n equals a,t,g, or c
  misc feature (417): n equals a,t,g, or c
  misc feature (420): n equals a,t,g, or c
attcaggggctgacacttcaaggtgacagaaggaccagcccttgagggagaacttatggccacagcccatccatagtaactgacatgattagcagaagaaaggaacatttaggggcaagcaggcgctgtgctatcatgatggaatttcatatctacagatagagagtttgttgtgtacagacttgttgtgactttgacgcttgcgaactagagatgtgcaattgatttcttttcttcctggctttttaactcccctgtttcaatcactgtcctcccacacnagggaangacagaaaggaaattggccttcctttttttccttggcccccttcccccaaggcctttaaacttttggaaccccaaggaaaactgnnttggaaaaacccntttcncngggtttgnaaaaaattgggaaanccnccca

SEQ ID NO: 439 - DNA, 382 bp, Homo sapiens
  misc feature (94): n equals a,t,g, or c
  misc feature (316): n equals a,t,g, or c
  misc feature (357): n equals a,t,g, or c
  misc feature (378): n equals a,t,g, or c
  misc feature (380): n equals a,t,g, or c
  misc feature (381): n equals a,t,g, or c
gcccagcccagaacaggggtggattccccaacctcaacctcctttcttctctgctcccaaaccatgtcaggaccaccttcctctagagctcggnagcccggagggtcttcacccactcctactccagtatcagctggcacgggctccttcctgagagcaaaggtcaaggaccccctctgtgaaggctcagcagaggtgggatcccacgccccctcccggcccctccctgccctccattcagggagaaacctctccttcccgtgtgagaagggccagagggtccaggcatcccaagtccagcgtgaagggccacagnccctcttggctgccaagcacgcagatcccatggacatttgnggaaagggctccttgcctgcngnng

SEQ ID NO: 440 - DNA, 231 bp, Homo sapiens
  misc feature (143): n equals a,t,g, or c
  misc feature (180): n equals a,t,g, or c
  misc feature (186): n equals a,t,g, or c
  misc feature (211): n equals a,t,g, or c
  misc feature (218): n equals a,t,g, or c
gaagaaatcaaaacaagatcacaagaatactgaaaaatgaagcctaaaatgaagtattcaaccaacaaaatttccacagcaaagtggaagaacacagcaagcaaagccttgtgtttcaagctgggaaaatcccaacagaaggncaaagaagtttgccccatgtactttatgaagctccgntctggncttatgataaaaaaggaggcctggnactttangagagaaaccacc

SEQ ID NO: 441 - DNA, 86 bp, Homo sapiens
  misc feature (69): n equals a,t,g, or c
  misc feature (73): n equals a,t,g, or c
  misc feature (78): n equals a,t,g, or c
  misc feature (84): n equals a,t,g, or c
  misc feature (85): n equals a,t,g, or c
gggcggttggtgcggcctccattgttcgtgttttaaggcgccatgaggggtgacagaggcctgtggtcntggnggacnctttgnnt

SEQ ID NO: 442 - DNA, 541 bp, Homo sapiens
  misc feature (472): n equals a,t,g, or c
  misc feature (499): n equals a,t,g, or c
  misc feature (501): n equals a,t,g, or c
caaacccactccaccttactaccagacaaccttagccaaaccatttacccaaataaagtataggcgatagaaaattgaaacctggcgcaatagatatagtaccgcaagggaaagatgaaaaattataaccaagcataatatagcaaggactaacccctataccttctgcataatgaattaactagaaataactttgcaaggagagccaaagctaagacccccgaaaccagacgagctacctaagaacagctaaaagagcacacccgtctatgtagcaaaatagtgggaagatttataggtagaggcgacaaacctaccgagcctggtgatagctggttgtccaagatagaatcttagttcaactttaaatttgcccacagaaccctctaaatccccttgtaaatttaactgttagtccaaagaagaacagctctttggacactaggaaaaaacttgtagagagagtaaaaanttaacacccatagtaggctaaaagcancnccaatttaagaaagcgttcaagctcacacccactacctaa

SEQ ID NO: 443 - DNA, 408 bp, Homo sapiens
  misc feature (312): n equals a,t,g, or c
  misc feature (375): n equals a,t,g, or c
  misc feature (387): n equals a,t,g, or c
  misc feature (390): n equals a,t,g, or c
  misc feature (392): n equals a,t,g, or c
cgacgaggttttccaggttacatgtatacagatttagccacgatatatgaacgcgctgggcgagtggaagggagaaacggctcgattactcaaatccctattctaaccatgcctaatgatgatatcactcaccccatcccagacttgactggctacattacagaggggcagatctatgtggacagacagctgcacaacagacagatttatccacctatcaatgtgctgccctcactatcaacggttaatgaagtctgctattggagaaggggatgaccaggaaggatcatgccgatgtatctaaccagcttnattgcctgctatgctattggaaagggatgtgcaagccatgaaagcttgcgttggagaaaaaanccttacttaaangancntctctacttggaaatc

SEQ ID NO: 444 - protein, 323 aa, Homo sapiens
RKKMALTSFLPAPTQLSQDQLEAEEKARSQRSRQTSLVSSRREPPPYGYRKGWIPRLLEDFGDGGAFPEIHVAQYPLDMGRKKKMSNALAIQVDSEGKIKYDAIARQGQSKDKVIYSKYTDLVPKEVMNADDPDLQRPDEEAIKEITEKTRVALEKSVSQKVAAAMPVRAADKLAPAQYIRYTPSQQGVAFNSGAKQRVIRMVEMQKDPMEPPRFKINKKIPRGPPSPPAPVMHSPSRKMTVKEQQEWKIPPCISNWKNAKGYTIPLDKRLAADGRGLQTVHINENFAKLAEALYIADRKAREAVGNACPSREKNGSERKGKT

SEQ ID NO: 445 - protein, 640 aa, Homo sapiens
WVRPTRPTLTSICEKVIVPNMEFRAADEEAFEDNSEEYIRRDLEGSDIDTRRRAACDLVRGLCKFFEGPVTGIFSGYVNSMLQEYAKNPSVNWKHKDAAIYLVTSLASKAQTQKHGITQANELVNLTEFFVNHILPDLKSANVNEFPVLKADGIKYIMIFRNQVPKEHLLVSIPLLINHLQAESIVVHTYAAHALERLFTMRGPNNATLFTAAEIAPFVEILLTNLFKALTLPGSSENEYIMKAIMRSFSLLQEAIIPYIPTLITQLTQKLLAVSKNPSKPHFNHYMFEAICLSIRITCKANPAAVVNFEEALFLVFTEILQNDVQEFIPYVFQVMSLLLETHKNDIPSSYMALFPHLLQPVLWERTGNIPALVRLLQAFLERGSNTIASAAADKIPGLLGVFQKLIASKANDHQGFYLLNSIIEHMPPESVDQYRKQIFILLFQRLQNSKTTKFIKSFLVFINLYCIKYGALALQEIFDGIQPKMFGMVLEKIIIPEIQKVSGNVEKKICAVGITKLLTECPPMMDTEYTKLWTPLLQSLIGLFELPEDDTIPDEEHFIDIEDTPGYQTAFSQLAFAGKKEHDPVGQMVNNPKIHLAQSLHKLSTACPGRVPSMVSTSLNAEALQYLQGYLQAASVTLL

SEQ ID NO: 446 - protein, 157 aa, Homo sapiens
LEVAICCQGCGVAPDFTAVPGTWTPRLGVGVCFLLLAFTEATGVGGGGWESLKRDCHGSFPTRATSSHLTDARPKGLQPVAIPCFPRQPAPAAIPREVAQEGAWPRIRNWHTAKSPALPLVDSIVLEWPRSDELCACPWQWQAVSYGHLGRTWNLAS

SEQ ID NO: 447 - protein, 81 aa, Homo sapiens
  SITE (38): Xaa equals any of the naturally occurring L-amino acids
AEFCLWASPFPANSTDPVKAAQFEPPGRQMIAIRKRQXEETNNDYETADGGYMTLNPRAPTDDDKNIYLTLPPNDHVNSNN

SEQ ID NO: 448 - protein, 340 aa, Homo sapiens
CVWVLVCRPSGPGHDSIMYHNSSQKRHWTFSSEEQLARLRADANRKFRCKAVANGKVLPNDPVFLEPHEEMTLCKYYEKRLLEFCSVFKPAMPRSVVGTACMYFKRFYLNNSVMEYHPRIIMLTCAFLACKVDEFNVSSPQFVGNLRESPLGQEKALEQILEYELLLIQQLNFHLIVHNPYRPFEGFLIDLKTRYPILENPEILRKTADDFLNRIALTDAYLLYTPSQIALTAILSSASRAGITMESYLSESLMLKENRTCLSQLLDIMKSMRNLVKKYEPPRSEEVAVLKQKLERCHSAELALNVITKKRKGYEDDDYVSKKSKHEEEEWTDDDLVESL

SEQ ID NO: 449 - protein, 625 aa, Homo sapiens
ALGCRSLCCVIPQSHARDSGYLFVGLSGFRLPDQAPAPALQRRLYSPDADRDCCSHGPVSGGQSAQLVLDTKDLTIEKVVINGQEVKYALGERQSYKGSPMEISLPIALSKNQEIVIEISFETSPKSSALQWLTPEQTSGKEHPYLFSQCQAIHCRAILPCQDTPSVKLTYTAEVSVPKELVALMSAIRDGETPDPEDPSRKIYKFIQKVPIPCYLIALVVGALESRQIGPRTLVWSEKEQVEKSAYEFSETESMLKIAEDLGGPYVWGQYDLLVLPPSFPYGGMENPCLTFVTPTLLAGDKSLSNVIAHEISHSWTGNLVTNKTWDHFWLNEGHTVYLERHICGRLFGEKFRHFNALGGWGELQNSVKTFGETHPFTKLVVDLTDIDPDVAYSSVPYEKGFALLFYLEQLLGGPEIFLGFLKAYVEKFSYKSITTDDWKDFLYSYFKDKVDVLNQVDWNAWLYSPGLPPIKPNYDMTLTNACIALSQRWITAKEDDLNSFNATDLKDLSSHQLNEFLAQTLQRAPLPLGHIKRMQEVYNFNAINNSEIRFRWLRLCIQSKWEDAIPLALKMATEQGRMKFTRPLFKDLAAFDKSHDQAVRTYQEHKASMHPVTAMLVGKDLKVD

SEQ ID NO: 450 - protein, 95 aa, Homo sapiens
DGALLIPHLVQFLHLQMAAVRSWGRRTLQSHTKCLPPGPLSSLSATQCHQDEQSWPSIMTERGRLRGSPDCAELRTQWRFSGTLRSLWQAWSGSP

SEQ ID NO: 451 - protein, 147 aa, Homo sapiens
SSPVNATAFASCLCAVCDVTGLFCKHQHVGKLGSNLCAFVFPMGRDSGSRVPLCICFFVLAEILLEVGRFSQGFIRLMSISVLPSSKPHLLNGKGRWMAPAQLDLRLWSQRRCGAEAYPADTLDILLPPGCRGQRPPAQGSCTYLLI

SEQ ID NO: 452 - protein, 487 aa, Homo sapiens
DLERSYLLKINGKVAERPQHMLMRVSVGIHKEDIDAAIETYNLLSERWFTHASPTLFNAGTNRPQLSSCFLLSMKDDSIEGIYDTLKQCALISKSAGGIGVAVSCIRATGSYIAGTNGNSNGLVPMLRVYNNTARYVDQGGNKRPGAFAIYLEPWHLDIFEFLDLKKNTGKEEQRARDLFFALWIPDLFMKRVETNQDWSLMCPNECPGLDEVWGEEFEKLYASYEKQGRVRKVVKAQQLWYAIIESQTETGTPYMLYKDSCNRKSNQQNLGTIKCSNLCTEIVEYTSKDEVAVCNLASLALNMYVTSEHTYDFKKLAEVTKVVVRNLNKIIDINYYPVPEACLSNKRHRPIGIGVQGLADAFILMRYPFESAEAQLLNKQIFETIYYGALEASCDLAKEQGPYETYEGSPVSKGILQYDMWNVTPTDLWDWKVLKEKIAKYGIRNSLLIAPMPTASTAQILGNNESIEPYTSNIYTRRSCQENFRL

SEQ ID NO: 453 - protein, 330 aa, Homo sapiens
  SITE (213): Xaa equals any of the naturally occurring L-amino acids
EEVPLAQPESKRDILFLFDGSANLVGQFPVVRDFLYKIIDELNVKPEGTRIAVAQYSDDVKVESRFDEHQSKPEILNLVKRMKIKTGKALNLGYALDYAQRYIFVKSAGSRIEDGVLQFLVLLVAGRSSDRVDGPASNLKQSGVVPFIFQAKNADPAELEQIVLSPAFILAAESLPKIGDLHPQIVNLLKSVHNGAPAPVSGEKDVVFLLDGXEGVRSGFPLLKEFVQRVVESLDVGQDRVRVAVVQYSDRTRPEFYLNSYMNKQDVVNAVRQLTLLGGPTPNTGAALEFVLRNILVSSAGSRITEGVPQLLIVLTADSLGMMCGTPPWS

SEQ ID NO: 454 - protein, 280 aa, Homo sapiens
LEFRSGKVAFRDCEGRYLAPSGPSGTLKAGKATKVGKDELFALEQSCAQVVLQAANERNVSTRQGMDLSANQDEETDQETFQLEIDRDTKKCAFRTHTGKYWTLTATGGVQSTASSKNASCYFDIEWRDRRITLRASNGKFVTSKKNGQLAASVETAGDSELFLMKLINRPIIVFRGEHGFIGCRKVTGTLDANRSSYDVFQLEFNDGAYNIKDSTGKYWTVGSDSAVTSSGDTPVDFFFEFCDYNKVAIKVGGRYLKGDHAGVLKASAETVDPASLWEY

SEQ ID NO: 455 - protein, 255 aa, Homo sapiens
NSRVDPRVRTALQIFQRIPRWPHVAQWNRSSATPAGVRGGRAAATFRANDHQHIRYNPLQDEWVLVSAHRMKRPWQGQVEPQLLKTVPRHDPLNPLCPGAIRANGEVNPQYDSTFLFDNDFPALQPDAPSPGPSDHPLFQAKSARGVCKVMCFHPWSDVTLPLMSVPEIRAVVDAWASVTEELGAQYPWVQIFENKGAMMGCSNPHPHCQVWASSFLPDIAQREERSQQAYKSQHGEPLLMEYSRQSYSGRNVWS

SEQ ID NO: 456 - protein, 278 aa, Homo sapiens
  SITE (9): Xaa equals any of the naturally occurring L-amino acids
SPQWPLCAXKSVRVPNGGGGGGGLPISTVREVALLRRLEAFEHPNVVRLMDVCATSRTDREIKVTLVFEHVDQDLRTYLDKAPPPGLPAETIKDLMRQFLRGLDFLHANCIVHRDLKPENILVTSGGTVKLADFGLARIYSYQMALTPVVVTLWYRAPEVLLQSTYATPVDMWSVGCIFAEMFRRKPLFCGNSEADQLGKIFDLIGLPPEDDWPRDVSLPRGAFPPRGPRPVQSVVPEMEESGAQLLLEMLTFNPHKRISAFRALQHSYLHKDEGNPE

SEQ ID NO: 457 - protein, 35 aa, Homo sapiens
HPGREQQRAGHTTCQALGVCGTMSSPLQCIHSPDL

SEQ ID NO: 458 - protein, 154 aa, Homo sapiens
  SITE (111): Xaa equals any of the naturally occurring L-amino acids
  SITE (122): Xaa equals any of the naturally occurring L-amino acids
  SITE (131): Xaa equals any of the naturally occurring L-amino acids
  SITE (132): Xaa equals any of the naturally occurring L-amino acids
RYSVILLDTLLGRMLPQLVCRLVLRCSMDDSAGPREWLPRDSECHLCMSVTTQAGNSSEQAIPQAMLQACVGSWLDREKCKQFVEQHTPQLLTLVPRGWDAHTTCQASGCXGPCPALSSVSXAPTFDENSXXQAGHTHSPSLALILLSCKGKAK

SEQ ID NO: 459 - protein, 396 aa, Homo sapiens
  SITE (8): Xaa equals any of the naturally occurring L-amino acids
  SITE (370): Xaa equals any of the naturally occurring L-amino acids
  SITE (395): Xaa equals any of the naturally occurring L-amino acids
RVIGSTVXRGLRPSCPNSQSPVKVEETCGCRWTCPCVCTGSSTRHIVTFDGQNFKLTGSCSYVLFQNKEQDLEVILHNGACSPGARQGCMKSIEVKHSALSVELHSDMEVTVNGRLVSVPYVGGNMEVNVYGAIMHEVRFNHLGHIFTFTPQNNEFQLQLSPKTFASKTYGLCGICDENGANDFMLRDGTVTTDWKTLVQEWTVQRPGQTCQPILEEQCLVPDSSHCQVLLLPLFAECHKVLAPATFYAICQQDSCHQEQVCEVIASYAHLCRTNGVCVDWRTPDFCAMSCPPSLVYNHCEHGCPRHCDGNVSSCGDHPSEAVSALQIKSCWKAAVSLKRPALSALVRMESSTSSWKPGSRTTSPVRSAXASAGGRSTAQRSPAPRPKLPRVACXK

SEQ ID NO: 460 - protein, 124 aa, Homo sapiens
  SITE (112): Xaa equals any of the naturally occurring L-amino acids
  SITE (113): Xaa equals any of the naturally occurring L-amino acids
  SITE (119): Xaa equals any of the naturally occurring L-amino acids
  SITE (123): Xaa equals any of the naturally occurring L-amino acids
EQLTGSRAKSVGSWRRSSQSVKKPTEGKSREEEKKQKFWHLFPGCAKMGDWSFLGNFLEEVHKHSTVVGKVWLTVLFIFRMLVLGTAAESSWGDEQADFRCDTIQPGCQNVXXDQAFPXFPHXL

SEQ ID NO: 461 - protein, 76 aa, Homo sapiens
  SITE (75): Xaa equals any of the naturally occurring L-amino acids
PARWLLSTTMASTEGTCCPVNWVEHQDSCYWFSHSGMSWAEAEKYCQLKNAHLVVIKSREEQVRASWYSVPKTCXI

SEQ ID NO: 462 - protein, 138 aa, Homo sapiens
  SITE (66): Xaa equals any of the naturally occurring L-amino acids
  SITE (123): Xaa equals any of the naturally occurring L-amino acids
  SITE (128): Xaa equals any of the naturally occurring L-amino acids
LGPNKKKPAMLLFLLSALVLLTQPLGYLEAEMKTYSHRTMPSACTLVMCSSVESGLPGRDGRDGRXGPRGEKGDPGLPGAAGQAGMPGQAGPVGPKGDNGSVGEPGPKGDTWAKLDLQELPVXLVQLXEKVPWGSKGT

SEQ ID NO: 463 - protein, 246 aa, Homo sapiens [sequence omitted]

SEQ ID NO: 464 - protein, 232 aa, Homo sapiens
  SITE (223): Xaa equals any of the naturally occurring L-amino acids
  SITE (225): Xaa equals any of the naturally occurring L-amino acids
RDRSCRGPGRRSPIPSPQVLGTTWVPRAGEMVCGGFACSKNALCALNVVYMLVSLLLIGVAAWGKGLGLVSSIHIIGGVIAVGVFLLLIAVAGLVGAVNHHQVLLFFYMIILGLVFIFQFVISCSCLAINRSKQTDVINASWWVMSNKTRDELERSFDCCGLFNLTTLYQQDYDFCTAICKSQSPTCQMCGEKFLKHSDEALKILGGVGLFFSFTEILGVWLXMXFRNQKGS

SEQ ID NO: 465 - protein, 215 aa, Homo sapiens
GLAPPRSRTMAVKKIAIFGATGQTGLTTLAQAVQAGYEVTVLVRDSSRLPSEGPRPAHVVVGDVLQAADVDKTVAGQDAVIVLLGTRNDLSPTTVMSEGARNIVAAMKAHGVDKVVACTSAFLLWDPTKVPPRLQAVTDDHIRMHKVLRESGLKYVAVMPPHIGDQPLTGAYTVTLDGRGPSRVISKHDLGHFMLRCLTTDEYDGHSTYPSHQYQ

SEQ ID NO: 466 - protein, 131 aa, Homo sapiens
  SITE (95): Xaa equals any of the naturally occurring L-amino acids
  SITE (97): Xaa equals any of the naturally occurring L-amino acids
  SITE (103): Xaa equals any of the naturally occurring L-amino acids
RTTAVELFVKAGSDGAKIGNCPFSQRLFMVLWLKGVTFNVTTVDTKRRTETVQKLCPGGQLPFLLYGTEVHTDTNKIEEFLEAVLCPPRYPKLAXLXPESNTXGLDIFAKFSAYIKNSKPSTQLTIWRRDS

SEQ ID NO: 467 - protein, 211 aa, Homo sapiens
GLWISMLCRWLMWMVMNYSWKKNRMWRKNRSFYANNHCIGTDLNRNFASKHWCEEGASSSSCSETYCGLYPESEPEVKAVASFLRRNINQIKAYISMHSYSQHIVFPYSYTRSKSKDHEELSLVASEAVRAIEKTSKNTRYTHGHGSETLYLAPGGGDDWIYDLGIKYSFTIELRDTGTYGFLLPERYIKPTCREAFAAVSKIAWHVIRNV

SEQ ID NO: 468 - protein, 159 aa, Homo sapiens [sequence omitted]

SEQ ID NO: 469 - protein, 58 aa, Homo sapiens
KFTKCLVQLNILLFKCVLLNFLLSLLNNLCGKMCVSTFPSFFISYFQESNVAINCILV

SEQ ID NO: 470 - protein, 41 aa, Homo sapiens
  SITE (41): Xaa equals any of the naturally occurring L-amino acids
CSGTWKKHDRKIADQEIWERGMSIDLSFFFFFFFFFFFFFX

SEQ ID NO: 471 - protein, 60 aa, Homo sapiens
  SITE (54): Xaa equals any of the naturally occurring L-amino acids
QAGLSRYGSPLGRRKKGGSCLLPGEGLRGRGKPRAPTKADIDSQGLGLKPGTVXLSGSYW

SEQ ID NO: 472 - protein, 398 aa, Homo sapiens
  SITE (391): Xaa equals any of the naturally occurring L-amino acids
NQLSSIMVMFKKIKSFEVVFNDPEKVYGSGEKVAGRVIVEVCEVTRVKAVRILACGVAKVLWMQGSQQCKQTSEYLRYEDTLLLEDQPTGENEMVIMRPGNKYEYKFGFELPQGPLGTSFKGKYGCVDYWVKAFLDRPSQPTQETKKNFEVVDLVDVNTPDLMAPVSAKKEKKVSCMFIPDGRVSVSARIDRKGFCEGDEISIHADFENTCSRIVVPKAAIVARHTYLANGQTKVLTQKLSSVRGNHIISGTCASWRGKSLRVQKIRPSILGCNILRVEYSLLIYVSVPGSKKVILDLPLVIGSRSGLSSRTSSMASRTSSEMSWVDLNIPDTPEAPPCYMDVIPEDHRLESPTTPLLDDMDGSQDSPIFMYAPEFKFMPPPTYTEVGSLXSLLLNLS

SEQ ID NO: 473 - protein, 259 aa, Homo sapiens
  SITE (20): Xaa equals any of the naturally occurring L-amino acids
  SITE (61): Xaa equals any of the naturally occurring L-amino acids
  SITE (234): Xaa equals any of the naturally occurring L-amino acids
KEAGAATGPRAMWLCPLALXLILMAASGAACEVKDVCVGSPGIPGTPGSHGLPGRDGRDGXKGDPGPPGPMGPPGETPCPPGNNGLPGAPGVPGERGEKGEAGERGPPGLPAHLDEELQATLHDFRHQILQTRGALSLQGSIMTVGEKVFSSNGQSITFDAIQEACARAGGRIAVPRNPEENEAIASFVKKYNTYAYVGLTEGPSPGDFRYSDGTPVNYTNWYRGEPAGRGKEXCVEMYTDGQWNDRNCLYSRLTICEF

SEQ ID NO: 474 - protein, 231 aa, Homo sapiens
GTVPGKGQEYHGMGMSSLKLLKYVLFFFNLLFWICGCCILGFGIYLLIHNNFGVLFHNLPSLTLGNVFVIVGSIIMVVAFLGCMGSIKENKCLLMSFFILLLIILLAEVTLAILLFVYEQKLNEYVAKGLTDSIHRYHSDNSTKAAWDSIQSFLQCCGINGTSDWTSGPPASCPSDRKVEGCYAKARLWFHSNFLYIGIITICVCVIEVLGMSFALTLNCQIDKTSQTIGL

SEQ ID NO: 475 - protein, 498 aa, Homo sapiens
  SITE (9): Xaa equals any of the naturally occurring L-amino acids
  SITE (67): Xaa equals any of the naturally occurring L-amino acids
  SITE (119): Xaa equals any of the naturally occurring L-amino acids
  SITE (120): Xaa equals any of the naturally occurring L-amino acids
GTANEAPWXRTQSSALAGPSRSRHHGFLQSSAGGASTLGLPAARGKDFNVPLSISRLTPGGKAAQAXVAVGDWVLSIDGENAGSLTHIEAQNKIRACGERLSLGLSRAQPVQSKPQKAXXLPCPPALPGCVSAQASAPAADPPRYTFAPSVSLNKTARPFGAPPPADSAPQQNGQPLRPLVPDASKQRLMENTEDWRPRPGTGQSRSFRILAHLTGTEFMQDPDEEHLKKSSQVPRTEAPAPASSTPQEPWPGPTAPSPTSRPPWAVDPAFAERYAPDKTSTVLTRHSQPATPTPLQSRTSIVQAAAGGVPGGGSNNGKTPVCHQCHKVIRGRYLVALGHAYHPEEFVCSQCGKVLEEGGFFEEKGAIFCPPCYDVRYAPSCAKCKKKITGEIMHALKMTWHVHCFTCAACKTPIRNRAFYMEEGVPYCERDYEKMFGTKCHGCDFKIDAGDRFLEALGFSWHDTCFVCAICQINLEGKTFYSKKDRPLCKSHAFSHV

SEQ ID NO: 476 - protein, 268 aa, Homo sapiens
  SITE (146): Xaa equals any of the naturally occurring L-amino acids
  SITE (158): Xaa equals any of the naturally occurring L-amino acids
  SITE (164): Xaa equals any of the naturally occurring L-amino acids
QEAASLGAVTSCGQESLSRASPRSLSRFLLTAHPPAAAMRHLGAFLFLLGVLGALTEMCEIPEMDSHLVEKLGQHLLPWMDRLSLEHLNPSIYVGLRLSSLQAGTKEDLYLHSLKLGYQQCLLGSAFSEDDGDCQGKPSMGQLASXLLALRANCEFVXGHKGDXLVSQLKWFLEDEKRAIGHDHKGHPHTSYYQYGLGILALCLHQKRVHDSVVDKLLYAVEPFHQGHHSVDTAAMAGLAFTCLKRSNFNPGRRHGSPWPSEQCERRS

SEQ ID NO: 477 - protein, 549 aa, Homo sapiens
  SITE (217): Xaa equals any of the naturally occurring L-amino acids
  SITE (224): Xaa equals any of the naturally occurring L-amino acids
ILEFPVEEQDRVLSFRCQARIISGIHMQTSESTKSELVTVTESFSTPKFHISPTGMIMEGAQLHIKCTIQVTHLAQEFPEIIIQKDKAIVAHNRHGNKAVYSVMAMVEHSGNYTCKVESSRISKVSSIVVNITELFSKPELESSFTHLDQGERLNLSCSIPGAPPANFTIQKEDTIVSQTQDFTKIASKSDSGTYICTAGIDKVVKKSNTVQIVVCXMLSQPRXSYDAQFEVIKGQTIEVRCESISGTLPISYQLLKTSKVLENSTKNSNDPAVFKDNPTEDVEYQCVADNCHSHAKMLSEVLRVKVIAPVDEVQISILSSKVVESGEDIVLQCAVNEGSGPITYKFYREKEGKPFYQMTSNATQAFWTKQKASKEQEGEYYCTAFNRANHASSVPRSKILTVRVILAPWKKGLIAVVIIGVIIALLIIAAKCYFLRKAKAKQMPVEMSRPAVPLLNSNNEKMSDPNMEANSHYGHNDDVRNHAMKPINDNKEPLNSDVQYTEVQVSSAESHKDLGKKDTETVYSEVRKAVPDAVESRYSRTEGSLDGT

SEQ ID NO: 478 - protein, 364 aa, Homo sapiens
GRVGGRVGGPWVAATSADPERKSQAASAAMWATLPLLCAGAWLLGVPVCGAAELSVNSLEKFHFKSWMSKHRKTYSTEEYHHRLQTFASNWRKINAHNNGNHTFKMALNQFSDMSFAEIKHKYLWSEPQNCSATKSNYLRGTGPYPPSVDWRKKGNFVSPVKNQGACGSCWTFSTTGALESAIAIATGKMLSLAEQQLVDCAQDFNNHGCQGGLPSQAFEYILYNKGIMGEDTYPYQGKDGYCKFQPGKAIGFVKDVANITIYDEEAMVEAVALYNPVSFAFEVTQDFMMYRTGIYSSTSCHKTPDKVNHAVLAVGYGEKNGIPYWIVKNSWGPQWGMNGYFLIERGKNMCGLAACASYPIPLV

SEQ ID NO: 479 - protein, 451 aa, Homo sapiens
  SITE (266): Xaa equals any of the naturally occurring L-amino acids
  SITE (271): Xaa equals any of the naturally occurring L-amino acids
  SITE (388): Xaa equals any of the naturally occurring L-amino acids
STHASAHASAATQSCNLSLAMAPSSPRPALPALLVLLGALFPGPGNAQTSVSPSKVILPRGGSVLVTCSTSCDQPKLLGIETPLPKKELLLPGNNRKVYELSNVQEDSQPMCYSNCPDGQSTAKTFLTVYWTPERVELAPLPSWQPVGKNLTLRCQVEGGAPRANLTVVLLRGEKELKREPAVGEPAEVTTTVLVRRDHHGANFSCRTELDLRPQGLELFENTSAPYQLQTFVLPATPPQLVSPRVLEVDTQGTVVCSLDGLFPVXEAQVXLALGDQRLNPTVTYGNDSFSAKASVSVTAEDEGTQRLTCAVILGNQSQETLQTVTIYSFPAPNVILTKPEVSEGTEVTVKCEAHPRAKVTLNGVPAQPLGPRASCLLKATPEDNGRXSPALQPWRWPASLYTRTRPGSFVSCMAPDWTRGIVRETGRGQKIPSRLQCARLGGTHCPSSSV

SEQ ID NO: 480 - protein, 278 aa, Homo sapiens
GYCTHPSFISLQHLFLEGVNTNSSDLGSLPEKMQPFLLLLAFLLTPGAGTEEIIGGHEAKPHSRPYMAFVQFLQEKSRKRCGGILVRKDFVLTAAHCQGSSINVTLGAHNIKEQERTQQFIPVKRPIPHPAYNPKNFSNDIMLLQLERKAKWTTAVRPLRLPSSKAQVKPGQLCSVAGWGYVSMSTLATTLQEVLLTVQKDCQCERLFHGNYSRATEICVGDPKKTQTGFKGDSGGPLVCKDVAQGILSYGNKKGTPPGVYIKVSHFLPWIKRTMKRL

SEQ ID NO: 481 - protein, 119 aa, Homo sapiens
  SITE (79): Xaa equals any of the naturally occurring L-amino acids
NSLSPSPWSHWLSAAAPLLQRSARAFSVVIETLLMDTPSSYEAAMELFSPDQDMREAGAQLKKLVDTLPQKPRESIIKXMGKNSPKLTVLIRHFRKLEDPPTGSSLLPLPWFLEFHGPP

SEQ ID NO: 482 - protein, 216 aa, Homo sapiens
  SITE (5): Xaa equals any of the naturally occurring L-amino acids
  SITE (8): Xaa equals any of the naturally occurring L-amino acids
KVRLXVPXRNSRVDPRVREHSTCSKMDVGSKEVLMESPPDYSAAPRGRFGIPCCPVHLKRLLIVVVVVVLIVVVIVGALLMGLHMSQKHTEMVLEMSIGAPEAQQRLALSEHLVTTATFSIGSTGLVVYDYQQLLIAYKPAPGTCCYIMKIAPESIPSLEALTRKVHNFQAKPAVPTSKLGQAEGRDAGSAPSGGDPAFLGMAVSTLCGEVPLYYI

SEQ ID NO: 483 - protein, 57 aa, Homo sapiens
GSQEMTADLSPEGFMLGVEGILLRLLGYQETQPFPCEYLILLLVSVQLLLNNRQHEE

SEQ ID NO: 484 - protein, 332 aa, Homo sapiens
  SITE (204): Xaa equals any of the naturally occurring L-amino acids
LACVSPWMDMWTALLILQALLLPSLADGATPALRFVAVGDWGGVPNAPFHTAREMANAKEIARTVQILGADFILSLGDNFYFTGVQDINDKRFQETFEDVFSDRSLRKVPWYVLAGNHDHLGNVSAQIAYSKISKRWNFPSPFYRLHFKIPQTNVSVAIFMLDTVTLCGNSDDFLSQQPERPRDVKLARTQLSWLKKQLAAARXDYVLVAGHYPVWSIAEHGPTHCLVKQLRPLLATYGVTAYLCGHDHNLQYLQDENGVGYVLSGAGNFMDPSKRHQRKVPNGYLRFHYGTEDSLGGFAYVEISSKEMTVTYIEASGKSLFKTRLPRRARP

SEQ ID NO: 485 - protein, 431 aa, Homo sapiens
  SITE (263): Xaa equals any of the naturally occurring L-amino acids
  SITE (264): Xaa equals any of the naturally occurring L-amino acids
STSRACPELRGSEDLSTMERASCLLLLLLPLVHVSATTPEPCELDDEDFRCVCNFSEPQPDWSEAFQCVSAVEVEIHAGGLNLEPFLKRVDADADPRQYADTVKALRVRRLTVGAAQVPAQLLVGALRVLAYSRLKELTLEDLKITGTMPPLPLEATGLALSSLRLRNVSWATGRSWLAELQQWLKPGLKVLSIAQAHSPAFSCEQVRAFPALTSLDLSDNPGLGERGLMAALCPHKFPAIQNLALRNTGMETPTGVCAALAXXGVQPHSLDLSHNSLRATVNPSAPRCMWSSALNSLNLSFAGLEQVPKGLPAKLRVLDLSCNRLNRAPQPDELPEVDNLTLDGNPFLVPGTALPHEGSMNSGVVPACARSTLSVGVSGTLVLLQGARALPKIQDRIMNGLKLPWLQGSPVRTLRTFRPIQPFAPPLLKS

SEQ ID NO: 486 - protein, 510 aa, Homo sapiens
  SITE (145): Xaa equals any of the naturally occurring L-amino acids
HEETQSFSSAKMKHSLNALLIFLIITSAWGGSKGPLDQLEKGGETAQSADPQWEQLNNKNLSMPLLPADFHKENTVTNDWIPEGEEDDDYLDLEKIFSEDDDYIDIVDSLSVSPTDSDVSAGNILQLFHGKSRIQRLNILNAKFXFNLYRVLKDQVNTFDNIFIAPVGISTAMGMISLGLKGETHEQVHSILHFKDFVNASSKYEITTIHNLFRKLTHRLFRRNFGYTLRSVNDLYIQKQFPILLDFKTKVREYYFAEAQIADFSDPAFISKTNNHIMKLTKGLIKDALENIDPATQMMILNCIYFKGSWVNKFPVEMTHNHNFRLNEREVVKVSMMQTKGNFLAANDQELDCDILQLEYVGGISMLIVVPHKMSGMKTLEAQLTPRVVERWQKSMTNRTREVLLPKFKLEKNYNLVESLKLMGIRMLFDKNGNMAGISDQRIAIDLFKHQGTITVNEEGTQATTVTTVGFMPLSTQVRFTVDRPFLFLIYEHRTSCLLFMGRVANPSRS

SEQ ID NO: 487 - protein, 190 aa, Homo sapiens
  SITE (106): Xaa equals any of the naturally occurring L-amino acids
HLRRQQDTLSTALQWLLLLFTRYPDVQTRVQAELDQVVGRDRLPCMGDQPNLPYVLAFLYEAMRFSSFVPVTIPHATTANTSVLGYHIPKDTVVFVNQWSVNHDPXKWPNPENFDPARFLDKDGLINKDLTSRVMIFSVGKRRCIGEELSKMQLFLFISILAHQCDFRANPNEPAKMNFSYGLTIKPKCI

SEQ ID NO: 488 - protein, 159 aa, Homo sapiens
  SITE (129): Xaa equals any of the naturally occurring L-amino acids
KMQAPAFRDKKQGVSAKNQGAHDPDYENITLAFKNQDHAKGGHSRPTSQVPAQCRPPSDSTQVPCWLYRAILSLYILLALAFVLCIILSAFIMVKNAEMSKELLGFKRELWNVSNSVQACEERQKRGWXSVQQSITMVRSKIDRLETTLAGIKNIDTKV

SEQ ID NO: 489 - protein, 284 aa, Homo sapiens
  SITE (265): Xaa equals any of the naturally occurring L-amino acids
  SITE (282): Xaa equals any of the naturally occurring L-amino acids
ERERERERERGVPGAESEMSSSGTPDLPVLLTDLKIQYTKIFINNEWHDSVSGKKFPVFNPATEEELCQVEEGDKEDVDKAVKAARQAFQIGSPWRTMDASERGRLLYKLADLIERDRLLLATMESMNGGKLYSNAYLNDLAGCIKTLRYCAGWADKIQGRTIPIDGNFFTYTRHEPIGVCGQIIPWNFPLVMLIWKIGPALSCGNTVGCQTSRANSSHCSPRGIFNKRGRVSSWSSEYCSWLWAYSRGSHFFSHGYRQSSLHRXNRGWQVDQRSCREKQSXRG

SEQ ID NO: 490 - protein, 329 aa, Homo sapiens
  SITE (84): Xaa equals any of the naturally occurring L-amino acids
  SITE (328): Xaa equals any of the naturally occurring L-amino acids
AGGEHPEEDPGGGGQDPRGPDPGDEAEALTGRGGAGGQLEQTKRVKANLEKAKQTLENERGELANEVKVLLQGKGDSEHKRKKXEAQLQELQVKFNEGERVRTELADKVTKLQVELDNVTGLLSQSDSKSSKLTKDFSALESQLQDTQELLQEENRQKLSLSTKLKQVEDEKNSFREQLEEEEEAKHNLEKQIATLHAQVADMKKKMEDSVGCLETAEEVKRKLQKDLEGLSQRHEEKVAAYDKLEKTKTRLQQELDDLLVDLDHQRQSACNLEKKQKKFDQLLAEEKTISAKYAEERDRAEAEAREKETKALSLARALEEAMEQKAXW

SEQ ID NO: 491 - protein, 309 aa, Homo sapiens
GRAAAPGLATRTGECDCVSGSMAEKRHTRDSEAQRLPDSFKDSPSKGLGPCGWILVAFSFLFTVITFPISIWMCIKIIKEYERAIIFRLGRILQGGAKGPGLFFILPCTDSFIKVDMRTISFDIPPQEILTKDSVTISVDGVVYYRVQNATLAVANITNADSATRLLAQTTLRNVLGTKNLSQILSDREEIAHNMQSTLDDATDAWGIKVERVEIKDVKLPVQLQRAMAAEAEASREARAKVIAAEGEMNASRALKEASMVITESPAALQLRYLQTLTTIAAEKNSTIVFPLPIDMLQGIIGAKHSHLG

SEQ ID NO: 492 - protein, 135 aa, Homo sapiens
ETLPSNTMASNVTNKTDPRSMNSRVFIGNLNTLVVKKSDVEAIFSKYGKIVGCSVHKGFAFVQYVNERNARAAVAGEDGRMIAGQVLDINLAAEPKVNRGKAGVKRSAAEMYGSSFDLDYDFQRDYYDRMYSYPA

SEQ ID NO: 493 - protein, 358 aa, Homo sapiens
  SITE (43): Xaa equals any of the naturally occurring L-amino acids
GGSAMRLAVLFSGALLGLLAAQGTGNDCPHKKSATLLPSFTVXPTVTESTGTTSHRTTKSHKTTTHRTTTTGTTSHGPTTATHNPTTTSHGNVTVHPTSNSTATSQGPSTATHSPATTSHGNATVHPTSNSTATSPGFTSSAHPEPPPPSPSPSPTSKETIGDYTWTNGSQPCVHLQAQIQIRVMYTTQGGGEAWGISVLNPNKTKVQGSCEGAHPHLLLSFPYGHLSFGFMQDLQQKVVYLSYMAVEYNVSFPHAAQWTFSAQNASLRDLQAPLGQSFSCSNSSIILSPAVHLDLLSLRLQAAQLPHTGVFGQSFSCPSDRSILLPLIIGLILLGLLALVLIAFCIIRRRPSAYQAL

SEQ ID NO: 494 - protein, 430 aa, Homo sapiens
  SITE (14): Xaa equals any of the naturally occurring L-amino acids
  SITE (15): Xaa equals any of the naturally occurring L-amino acids
  SITE (290): Xaa equals any of the naturally occurring L-amino acids
  SITE (307): Xaa equals any of the naturally occurring L-amino acids
  SITE (412): Xaa equals any of the naturally occurring L-amino acids
GRPSSGLRSPGPGXXSFKKTSSFCADVLAQDLHKPAFEADISELILCQNEVDYALKNLQAWMKDEPRSTNLFMKLDSVFIWKEPFGLVLIIAPWNYPLNLTLVLLVGALAAGNCVVLKPSEISQGTEKVLAEVLPQYLDQSCFAVVLGGPQETGQLLEHKLDYIFFTGSPRVGKIVMTAATKHLTPVTLELGGKNPCYVDDNCDPQTVANRVAWFCYFNAGQTCVAPDYVLCSPEMQERLLPALQSTITRFYGDDPQSSPNLGRIINQKQFQRLRALLGCGRVAIGGQSXESDRYIAPTVLVDVQEXEPVMQEEIFGPILPIVNVQSLDEAIEFINRREKPLALYAFSNSSQVVKRVLTQTSSGGFCGNDGFMHMTLASLPFGGVGASGMGRYHGKFSFDTFSHHRACLLRXRGWRSSTPSATRRNRRAA

SEQ ID NO: 495 - protein, 439 aa, Homo sapiens
  SITE (8): Xaa equals any of the naturally occurring L-amino acids
  SITE (416): Xaa equals any of the naturally occurring L-amino acids
DSRTRYAXERDKAQFLSKELEHVKMELAKYKLAEKTETSHEQWLFKRLQEEEAKSGHLSREVDALKEKIHEYMATEDLICHLQGDHSVLQKKLNQQENRNRDLGREIENLTKELERYRHFSKSLRPSLNGRRISDPQVFSKEVQTEAVDNEPPDYKSLIPLERAVINGQLYEESENQDEDPNDEGSVLSFKCSQSTPCPVNRKLWIPWMKSKEGHLQNGKMQTKPNANFVQPGDLVLSHTPGQPLHIKVTPDHVQNTATLEITSPTTESPHSYTSTAVIPNCGTPKQRITILQNASITPVKSKTSTEDLMNLEQGMSPITMATFARAQTPESCGSLTPERTMSPIQVLAVTGSASSPEQGRSPEPTEISAKHAIFRVSPDRQSSWQFQRSNSNSSSVITTEDNKIHIHLGSPYMQXVASPVRPASPSAPLQDNRTQGLI

SEQ ID NO: 496 - protein, 149 aa, Homo sapiens
ESTGTASRAATMPNFSGNWKIIRSENFEELLKVLGVNVMLRKIAVAAASKPAVEIKQEGDTFYIKTSTTVRTTEINFKVGEEFEEQTVDGRPCKSLVKWESENKMVCEQKLLKGEGPKTSWTRELTNDGELILTMTADDVVCTRVYVRE

SEQ ID NO: 497 - protein, 395 aa, Homo sapiens
  SITE (164): Xaa equals any of the naturally occurring L-amino acids
AEKKSTKTHSLLVGREDRNDMSTAGKVIKCKAAVLWEVKKPFSIEDVEVAPPKAYEVRIKMVAVGICRTDDHVVSGNLVTPLPVILGHEAAGIVESVGEGVTTVKPGDKVIPLFTPQCGKCRVCKNPESNYCLKNDLGNPRGTLQDGTRRFTCRGKPIHHFLGXSTFSQYTVVDENAVAKIDAASPLEKVCLIGCGFSTGYGSAVNVAKVTPGSTCAVFGLGGVGLSAVMGCKAAGAARIIAVDINKDKFAKAKELGATECINPQDYKKPIQEVLKEMTDGGVDFSFEVIGRLDTMMASLLCCHEACGTSVIVGVPPASQNLSINPMLLLTGRTWKGAVYGGFKSKEGIPKLVADFMAKKFSLDALITHVLPFEKINEGFDLLHSGKSIRTVLTF

SEQ ID NO: 498 - protein, 281 aa, Homo sapiens
  SITE (5): Xaa equals any of the naturally occurring L-amino acids
  SITE (21): Xaa equals any of the naturally occurring L-amino acids
RTLGXPSASVLPHSRALLTPXRAPKKKMAISGVPVLGFFIIAVLMSAQESWAIKEEHVIIQAEFYLNPDQSGEFMFDFDGDEIFHVDMAKKETVWRLEEFGRFASFEAQGALANIAVDKANLEIMTKRSNYTPITNVPPEVTVLTNSPVELREPNVLICFIDKFTPPVVNVTWLRNGKPVTTGVSETVFLPREDHLFRKFHYLPFLPSTEDVYDCRVEHWGLDEPLLKHWEFDAPSPLPETTENVVCALGLTVGLVGIIIGTIFIIKGVRKSNAAERRGPL

SEQ ID NO: 499 - protein, 446 aa, Homo sapiens
PEQGGERLSCPPELLPGDNPSQPIAQPRSPYIRPRLLALPLGQCHLQDTDSPPSAQPSQVSYTATMPFGNTHNKFKLNYKPEEEYPDLSKHNNHMAKVLTLELYKKLRDKETPSGFTVDDVIQTGVDNPGHPFIMTVGCVAGDEESYEVFKELFDPIISDRHGGYKPTDKHKTDLNHENLKGGDDLDPNYVLSSRVRTGRSIKGYTLPPHCSRGERRAVEKLSVEALNSLTGEFKGKYYPLKSMTEKEQQQLIDDHFLFDKPVSPLLLASGMARDWPDARGIWHNDNKSFLVWVNEEDHLRVISMEKGGNMKEVFRRFCVGLQKIEEIFKKAGHPFMWNQHLGYVLTCPSNLGTGLRGGVHVKLAHLSKHPKFEEILTRLRLQKRGTGGVDTAAVGSVFDVSNADRLGSSEVEQVQLVVDGVKLMVEMEKKLEKGQSIDDMIPAQK

SEQ ID NO: 500 - protein, 198 aa, Homo sapiens
  SITE (7): Xaa equals any of the naturally occurring L-amino acids
  SITE (8): Xaa equals any of the naturally occurring L-amino acids
  SITE (125): Xaa equals any of the naturally occurring L-amino acids
  SITE (179): Xaa equals any of the naturally occurring L-amino acids
  SITE (196): Xaa equals any of the naturally occurring L-amino acids
LCPRHAXXAHLHVEIFGTQGKPAIAHRDFKSRNVLVKSNLQCCIADLGLAVMHSQGSDYLDIGNNPRVGTKRYMAPEVLDEQIRTDCFESYKWTDIWAFGLVLWEIARRTIVNGIVEDYRPPFYXVVPNDPSFEDMKKVVCVDQQTPTIPNRLAADPVLSGLAQMMRECWYPNPSARLXALGSRRHYKKLATVQRXLK

SEQ ID NO: 501 - protein, 354 aa, Homo sapiens
  SITE (119): Xaa equals any of the naturally occurring L-amino acids
  SITE (137): Xaa equals any of the naturally occurring L-amino acids
  SITE (141): Xaa equals any of the naturally occurring L-amino acids
HEGGGHGHAGHHHHHHHHHHHPPMIALQPLVTDDPTQVHHHQEVILVQTREEVVGGDDSDGLRAEDGFEDQILIPVPAPAGGDDDYIEQTLVTVAAAGKSGGGGSFVVGRRPRQEGRRXEERQEELPQRRGARRAAXRTRXNKKWEQKQVQIKTLEGEFSVTMWSSDEKKDIDHETVVEEQIIGENSPPDYSEYMTGKKLPPGGIPGIDLSDPKQLAEFARMKPRKIKEDDAPRTIACPHKGCTKMFRDNSAMRKHLHTHGPRVHVCAECGKAFVESSKLKRHQLVHTGEKPFQCTFEGCGKRFSLDFNLRTHVRIHTGDRPYVCPFDGCNKKFAQSTNLKSHILTHAKAKNNQ

SEQ ID NO: 502 - protein, 81 aa, Homo sapiens
LPWLLFETVMTFLLISLLVSFSGRAGCLEFSVKETQDSPLFLCLWESPWHTPKRGPCSVSQGSFCIFGLASYICHVVSSSA

SEQ ID NO: 503 - protein, 59 aa, Homo sapiens
  SITE (5): Xaa equals any of the naturally occurring L-amino acids
  SITE (29): Xaa equals any of the naturally occurring L-amino acids
  SITE (41): Xaa equals any of the naturally occurring L-amino acids
  SITE (49): Xaa equals any of the naturally occurring L-amino acids
  SITE (51): Xaa equals any of the naturally occurring L-amino acids
  SITE (56): Xaa equals any of the naturally occurring L-amino acids
TPAPXSPAAARESTRRVAINVRASIALSXSLRTLVLPRLTXTSPGPRGXGXFGCPXSFK

SEQ ID NO: 504 - protein, 251 aa, Homo sapiens
SLFTMSLQRLLQHSSNGNLADFCAGPAYSSYSTLTGSLTMDDNRRIQMLADTVATLPRGRKQLALTRSSSLSDFSWSQRKLVTVEKQDNETFGFEIQSYRPQNQNACSSEMFTLICKIQEDSPAHCAGLQAGDVLANINGVSTEGFTYKQVVDLIRSSGNLLTIETLNGTMILKRTELEAKLQVLKQTLKQNGWSTDLCSYRNIVCFMVMQLIAPVWENMGLGMELSLFGPLPGPGPALVDRNRLSSESSC

SEQ ID NO: 505 - protein, 112 aa, Homo sapiens
  SITE (21): Xaa equals any of the naturally occurring L-amino acids
  SITE (70): Xaa equals any of the naturally occurring L-amino acids
IRQSGTSGTRPRGPQEPRAAXRGSFLASARRVGSWLVSAEGVGGPALLFSPAKPQWELGQGESQAIGGQXWGCSPTVCICSALWGIQEHPPSRGWEPCPMKPSPQLYLLPRP

SEQ ID NO: 506 - protein, 105 aa, Homo sapiens
  SITE (15): Xaa equals any of the naturally occurring L-amino acids
KNHVSSLSSYFFFSXFSLPRTFSLFSTNVHLVFFGSAKISICVCLQLSLLTAHSKGFCISGFHFVAAEMLRQASASAPAGCTMLLPRREDTESKWQDLRLASTLP

SEQ ID NO: 507 - protein, 406 aa, Homo sapiens
  SITE (71): Xaa equals any of the naturally occurring L-amino acids
VKGDKGNPGWPGAPGVPGPKGDPGFQGMPGIGGSPGITGSKGDMGPPGVPGFQGPKGLPGLQGIKGDQGDXGVPGAKGLPGPPGPPGPYDIIKGEPGLPGPEGPPGLKGLQGLPGPKGQQGVTGLVGIPGPPGIPGFDGAPGQKGEMGPAGPTGPRGFPGPPGPDGLPGSMGPPGTPSVDHGFLVTRHSQTIDDPQCPSGTKILYHGYSLLYVQGNERAHGQDLGTAGSCLRKFSTMPFLFCNINNVCNFASRNDYSYWLSTPEPMPMSMAPITGENIRPFISRCAVCEAPAMVMAVHSQTIQIPPCPSGWSSLWIGYSFVMHTSAGAEGSGQALASPGSCLEEFRSAPFIECHGRGTCNYYANAYSFWLATIERSEMFKKPTPSTLKAGELRTHVSRCQVCMRRT

SEQ ID NO: 508 - protein, 91 aa, Homo sapiens
  SITE (13): Xaa equals any of the naturally occurring L-amino acids
LPSPNTGLWPQRXSFSGRKFVPTDCPPAFFPLAAICCRLEPESRPAFSKLEDSFEALSLYLGELGIPLPAELEELDHTVSMQYGLTRDSPP

SEQ ID NO: 509 - protein, 74 aa, Homo sapiens
  SITE (31): Xaa equals any of the naturally occurring L-amino acids
TCIHIGFQDILSYIFSSFQSCFLFWGYFFFXLCNSQRAAFFFFFNKAYNYGWIFCSSLLRRAILFFRVTSKVMW

SEQ ID NO: 510 - protein, 47 aa, Homo sapiens [sequence omitted]

SEQ ID NO: 511 - protein, 246 aa, Homo sapiens
  SITE (207): Xaa equals any of the naturally occurring L-amino acids
GARSPAMSRSNRQKEYKCGDLVFAKMKGYPHWPARIDEMPEAAVKSTANKYQVFFFGTHETAFLGPKDLFPYEESKEKFGKPNKRKGFSEGLWEIENNPTVKASGYQSSQKKSCVEEPEPEPEAAEGDGDKKGNAEGSSDEEGKLVIDEPAKEKNEKGALKRRAGDLLEDSPKRPKEAENPEGEEKEAATLEVERPLPMEVEKNSTXSEPGSGRGPPQEEEEEEDEEEEATKEDAEAPGIRDHESL

SEQ ID NO: 512 - protein, 250 aa, Homo sapiens
  SITE (2): Xaa equals any of the naturally occurring L-amino acids
LXWETVQKNQNLRCFVFIFISSWTDLGVATVVCQPNEFIMPDSAVVGDVLVLTKPLGTQVAVNAHQWLDNPERWNKVKMVVSREEVELAYQEAMFNMATLNRTAAGLMHTFNAHAATDITGFGILGHSQNLAKQQRNEVSFVIHNLPIIAKMAAVSKASGRFGLLQGTSAETSGGLLICLPREQAARFCSEIKSSKYGEGHQAWIVGIVEKGNRTARIIDKPRVIEVLPRGATAAVLAPDSSNASSEPSS

SEQ ID NO: 513 - protein, 418 aa, Homo sapiens
  SITE (56): Xaa equals any of the naturally occurring L-amino acids
  SITE (213): Xaa equals any of the naturally occurring L-amino acids
  SITE (275): Xaa equals any of the naturally occurring L-amino acids
  SITE (320): Xaa equals any of the naturally occurring L-amino acids
PFEDSGQRRHHEGAGSAGPLLQSTIIVEKTVQDLLNLMHDLSAYSDQFLNMVCVKXQEYKDTCTAAYRGIVQSEEKLVISASWAKDDDISRLLKSLPNWMNMAQPKQLRPKREEEEDFIRAAFGKESEVLIGNLGDKLIPPQDILRDVSDLKALANMHESLEWLASRTKSAFSNLSTSQMLSPAQDSHTNTDLPPVSEQIMQTLSELAKSFQXMADRCLLVLHLEVRVHCFHYLIPLAKEGNYAIVANVESMDYDPLVVKLNKDISAIEEAMSAXFQQHKFQYIFEGLGHLISCILINGAQYFRRISESGIKKMCRNIFXLQQNLTNITMSREADLDFARQYYEMLYNTADELLNLVVDQGVKYTELEYIHALTLLHRSQTGVGELTTQNTRLQRLKEIICEQAAIKQATKDKKITTV

SEQ ID NO: 514 - protein, 61 aa, Homo sapiens
KASDCSMLTPTSRYEQFTENLPLWQLKMEVWGAQTTLSNNIKANINSHKHYRICKFRTFYT

SEQ ID NO: 515 - protein, 181 aa, Homo sapiens
  SITE (7): Xaa equals any of the naturally occurring L-amino acids
  SITE (36): Xaa equals any of the naturally occurring L-amino acids
  SITE (37): Xaa equals any of the naturally occurring L-amino acids
  SITE (39): Xaa equals any of the naturally occurring L-amino acids
  SITE (48): Xaa equals any of the naturally occurring L-amino acids
  SITE (122): Xaa equals any of the naturally occurring L-amino acids
RSWGGLXRSTGTARRTSWRRSGQCRTGCADTTTSWXXPXTLQRRVQPXVNVSPSKKGPLQHHNLLVCHVTDFYPGSIQVRWFLNGQEETAGVVSTNLIRNGDWTFQILVMLEMTPQQGDVYXCQVEHTSLDSPVTVEWKAQSDSARSKTLTGAGGFVLGLIICGVGIFMHRRSKKVQRGSA

SEQ ID NO: 516 - protein, 255 aa, Homo sapiens
ALERRVRKSGDCCTDSGTMNIFDRKINFDALLKFSHITPSTQQHLKKVYASFALCMFVAAAGAYVHMVTHFIQAGLLSALGSLILMIWLMATPHSHETEQKRLGLLAGFAFLTGVGLGPALEFCIAVNPSILPTAFMGTAMIFTCFTLSALYARRRSYLFLGGILMSALSLLLLSSLGNVFFGSIWLFQANLYVGLVVMCGFVLFDTQLIIEKAEHGDQDYIWHCIDLFLDFITVFRKLMMILAMNEKDKKKEKK

SEQ ID NO: 517 - protein, 247 aa, Homo sapiens
  SITE (1): Xaa equals any of the naturally occurring L-amino acids
  SITE (6): Xaa equals any of the naturally occurring L-amino acids
  SITE (23): Xaa equals any of the naturally occurring L-amino acids
  SITE (81): Xaa equals any of the naturally occurring L-amino acids
XVGRGXRCSSASPGTPPPRAPAXPSAGRADPAVLSPAARAGAAPSAPQQTPIMGSQSSKAPRGDVTAEEAAGASPAKANGXENGHVKSNGDLSPKGEGESPPVNGTDEAAGATGDAIEPAPPSQGAEAKGEVPPKETPKKKKKFSFKKPFKLSGLSFKRNRKEGGGDSSASSPTEEEQEQGEIGACSDEGTAQEGKAAATPESQEPQAKGAEASAASEEEAGPQATEPSTPSGPESGPTPASAEQNE

SEQ ID NO: 518 - protein, 430 aa, Homo sapiens
  SITE (11): Xaa equals any of the naturally occurring L-amino acids
QRGARDIWPEXLSGPTRAPGSAALPGSKGDTGNPGAPGTPGTKGWAGDSGPQGRPGVFGLPGEKGPRGEQGFMGNTGPTGAVGDRGPKGPKGDPGFPGAPGTVGAPGIAGIPQKIAVQPGTVGPQGRRGPPGAPGEMGPQGPPGEPGFRGAPGKAGPQGRGGVSAVPGFRGDEGPIGHQGPIGQEGAPGRPGSPGLPGMPGRSVSIGYLLVKHSQTDQEPMCPVGMNKLWSGYSLLYFEGQEKAHNQDLGLAGSCLARFSTMPFLYCNPGDVCYYASRNDKSYWLSTTAPLPMMPVAEDEIKPYISRCSVCEAPAIAIAVHSQDVSIPHCPAGWRSLWIGYSFLMHTAAGDEGGGQSLVSPGSCLEDFRATPFIECNGGRGTCHYYANKYSFWLTTIPEQSFQGSPSADTLKAGLIRTHISRCQVCMKNL

SEQ ID NO: 519 - protein, 68 aa, Homo sapiens
  SITE (68): Xaa equals any of the naturally occurring L-amino acids
SCFLRKDLSNWQLQRHYFLTVLYHVLLLTLQKGSGRETVSLFYLFSLKYKSIPTNHLLWSACFTCPLX

SEQ ID NO: 520 - protein, 97 aa, Homo sapiens
  SITE (42): Xaa equals any of the naturally occurring L-amino acids
  SITE (55): Xaa equals any of the naturally occurring L-amino acids
PRSPTGEWLPRDSECHLCMSVTTQAGNSSEQAIPQAMLQACXGSWLDREKCKQFXEQHTPQLLTLVPRGWDAHTTCQALGVCGTMSSPLQCIHSPDL

SEQ ID NO: 521 - protein, 119 aa, Homo sapiens
  SITE (105): Xaa equals any of the naturally occurring L-amino acids
SQGLGNGGVAGSSGQVRTPSAGQVSPFPPQASLPQPSERRRFRGSRAGGEKQTPSQQRGRMGAGELAKVTSSRGEPRLRKAGGLWARSRQKEQEGREGAQGWPAXGPACHLHPPQFHFS

SEQ ID NO: 522 - protein, 262 aa, Homo sapiens
  SITE (21): Xaa equals any of the naturally occurring L-amino acids
ARERTDLWVLGGHGATRCMRXPRGQRPESALPVAGSGRRSDPGHYSFSMRSPELALPRGMQPTEFFQSLGGDGERNVQIEMAHGTTTLAFKFQHGVIAAVDSRASAGSYISALRVNKVIEINPYLLGTMSGCAADCQYWERLLAKECRLYYLRNGERISVSAASKLLSNMMCQYRGMGLSMGSMICGWDKKGPGLYYVDEHGTRLSGNMFSTGSGNTYAYGVMDSGYRPNLSPEEAYDLGRRLLLMPLTETAILEALSICTT

SEQ ID NO: 523 - protein, 110 aa, Homo sapiens
TRRTCDFTVILLPARAHLAMAMFALNGGESLSLLDQILLHYYTSTLFIWGWAGSDSSLVVQLPDYCPILLEAHVCQGVVCTAVFGTSSLFSAISFPYLSFSVDFIHHRTE

SEQ ID NO: 524 - protein, 53 aa, Homo sapiens
LEKEEYATETVCSLQSLKCLLSGLGVCLPCSRLSASGTVVQYSGTAQLHFSAR

SEQ ID NO: 525 - protein, 205 aa, Homo sapiens
RSCSGCARSGLRREVPRQREAPPPPPRSVLHLSATLAGAAAARGTLNMSGIALSRLAQERKAWRKDHPFGFVAVPTKNPDGTMNLMNWECAIPGKKGTPWEGGLFKLRMLFKDDYPSSPPKCKFEPPLFHPNVYPSGTVCLSILEEDKDWRPAITIKQILLGIQELLNEPNIQDPAQAEAYTIYCQNRVEYEKRVRAQAKKFAPS

SEQ ID NO: 526 - protein, 90 aa, Homo sapiens
FGRARLIEDNEYTARQGAKFPIKWTAPEAALYGRFTIKSDVWSFGILLTELVTKGRVPYPGMNNREVLEQVERGYRMPCPQTAPSLCMSS

SEQ ID NO: 527 - protein, 479 aa, Homo sapiens
AWSIMADMQNLVERLERAVGRLEAVSHTSDMHRGYADSPSKAGAAPYVQAFDSLLAGPVAEYLKISKEIGGDVQKHAEMVHTGLKLERALLVTASQCQQPAENKLSDLLAPISEQIKEVITFREKNRGSKLFNHLSAVSESIQALGWVAMAPKPGPYVKEMNDAAMFYTNRVLKEYKDVDKKHVDWVKAYLSIWTELQAYIKEFHTTGLAWSKTGPVAKELSGLPSGPSAGSGPPPPPPGPPPPPVSTSSGSDESASRSALFAQINQGESITHALKHVSDDMKTHKNPALKAQSGPVRSGPKPFSAPKPQTSPSPKRATKKEPAVLELEGKKWRVENQENVSNLVIEDTELKQVAYIYKCVNTTLQIKGKINSITVDNCKKLGLVFDDVVGIVEIINSKDVKVQVMGKVPTISINKTDGCHAYLSKNSLDCEIVSAKSSEMNVLIPTEGGDFNEFPVPEQFKTLWNGQKLVTTVTEIAG

SEQ ID NO: 528 - protein, 605 aa, Homo sapiens
  SITE (3): Xaa equals any of the naturally occurring L-amino acids
  SITE (12): Xaa equals any of the naturally occurring L-amino acids
  SITE (82): Xaa equals any of the naturally occurring L-amino acids
  SITE (191): Xaa equals any of the naturally occurring L-amino acids
  SITE (248): Xaa equals any of the naturally occurring L-amino acids
  SITE (324): Xaa equals any of the naturally occurring L-amino acids
NHXRTRDQEAPXDVQVRPEDTPSDLSVSNSSVILENTMEDHAAEASGKPLGEISVPLDSSLLCTLSSESHQEAASNENDKKXGNYKSMLRPEVGTTSQDSALLDQELYNSFHFWRTPLPEIDLDIELEQNSGGKPSPEGPEEESEGPVPSSPNITMATRKELEEMIENLEPHIDDPDVKAQVEVLSAALRXSSLDAHEETISIEKRSDLQDELDINELPNCKINQEDSVPLISDAVENMDSTLHYIHXDSDLSNNSSFSPDEERRTKVQDVVPQALLDQYLSMTDPSRAQTVDTEIAKHCAYSLPGVALTLGRQNWHCLRETYXTLASDMQWKVRRTLAFSIHELAVILGDQLTAADLVPIFNGFLKDLDEVRIGVLKHLHDFLKLLHIDKRREYLYQLQEFLVTDNSRNWRFRAELAEQLILLLELYSPRDVYDYLRPIALNLCADKVSSVRWISYKLVSEMVKKLHAATPPTFGVDLINELVENFGRCPKWSGRQAFVFVCQTVIEDDCLPMDQFAVHLMPHLLTLANDRVPNVRVLLAKTLRQTLLEKDYFLASASCHQEAVEQTIMALQMDRDSDVKYFASIHPASTKISEDAMSTASSTY

SEQ ID NO: 529 - protein, 179 aa, Homo sapiens
HYRRYACRYRSGIPGSTHASELGTSLSAMRFLAATFLLLALSTAAQAEPVQFKDCGSVDGVIKEVNVSPCPTQPCQLSKGQSYSVNVTFTSNIQSKSSKAVVHGILMGVPVPFPIPEPDGCKSGINCPIQKDKTYSYLNKLPVKSEYPSIKLVVEWQLQDDKNQSLFCWEIPVQIVSHL

SEQ ID NO: 530 - protein, 168 aa, Homo sapiens
  SITE (167): Xaa equals any of the naturally occurring L-amino acids
VRAEHCAVWERNFEETVRWFWRLGSPRPVGSHLTSVKFLMTSPEIASLSWGQMKVKGSNTTYKDCKVWPGGSRTWDWRETGTEHSPGVQPADVKEVVEKGVQTLVIGRGMSEALKVPSSTVEYLKKHGIDVRVLQTEQAVKEYNALVAKGSGWEVSSIPPADGALRXE

SEQ ID NO: 531 - protein, 705 aa, Homo sapiens
EPRARATRRGMAATGTAAAAATGRLLLLLLVGLTAPALALAGYIEALAANAGTGFAVAEPQIAMFCGKLNMHVNIQTGKWEPDPTGTKSCFETKEEVLQYCQEMYPELQITNVMEANQRVSIDNWCRRDKKQCKSRFVTPFKCLVGEFVSDVLLVPEKCQFFHKERMEVCENHQHWHTVVKEACLTQGMTLYSYGMLLPCGVDQFHGTEYVCCPQTKIIGSVSKEEEEEDEEEEEEEDEEEDYDVYKSEFPTEADLEDFTEAAVDEDDEDEEEGEEVVEDRDYYYDTFKGDDYNEENPTEPGSDGTMSDKEITHDVKVPPTPLPTNDVDVYFETSADDNEHARFQKAKEQLEIRHRNRMDRVKKEWEEAELQAKNLPKAERQTLIQHFQAMVKALEKEAASEKQQLVETHLARVEAMLNDRRRMALENYLAALQSDPPRPHRILQALRRYVRAENKDRLHTIRHYQHVLAVDPEKAAQMKSQVMTHLHVIEERRNQSLSLLYKVPYVAQEIQEEIDELLQEQRADMDQFTASISETPVDVRVSSEESEEIPPFHPFHPFPALPENEGSGVGEQDGGLIGAEEKVINSKNKVDENMVIDETLDVKEMIFNAERVGGLEEERESVGPLREDFSLSSSALIGLLVIAVAIATVIVISLVMLRKRQYGTISHGIVEVDPMLTPEERHLNKMQNHGYENPTYKYLEQMQI

SEQ ID NO: 532 - protein, 82 aa, Homo sapiens
  SITE (51): Xaa equals any of the naturally occurring L-amino acids
SRLPEPPGFLVKFAEEDLSVLTYMLHRTNESLRQSFFTQQRLIFFHPLLGXKHSCPACLHFKHDQNCASLQITTDQQWGPAS

SEQ ID NO: 533 - protein, 283 aa, Homo sapiens
  SITE (27): Xaa equals any of the naturally occurring L-amino acids
  SITE (28): Xaa equals any of the naturally occurring L-amino acids
KRFLKRIRDLGEGHFGKVELCRYDPEXXNTGEQVAVKSLKPESGGNHIADLKKEIEILRNLYHENIVKYKGICTEDGGNGIKLIMEFLPSGSLKEYLPKNKNKINLKQQLKYAVQICKGMDYLGSRQYVHRDLAARNVLVESEHQVKIGDFGLTKAIETDKEYYTVKDDRDSPVFWYAPECLMQSKFYIASDVWSFGVTLHELLTYCDSDSSPMALFLKMIGPTHGQMTVTRLVNTLKEGKRLPCPPNCPDEVYQLMRKCWEFQPSNRTSFQNLIEGFEALLK

SEQ ID NO: 534 - protein, 246 aa, Homo sapiens
FRAEREENFFLAWAPCRSVCQPSSPAYQCRALPTPPPAPPVSAMAKAYDHLFKLLLIGDSGVGKTCLIIRFAEDNFNNTYISTIGIDFKIRTVDIEGKKIKLQVWDTAGQERFKTITTAYYRGAMGIILVYDITDEKSFENIQNWMKSIKENASAGVERLLLGNKCDMEAKRKVQKEQADKLAREHGIRFFETSAKSSMNVDEAFSSLARDILLKSGGRRSGNGNKPPSTDLKTCDKKNTNKCSLG

SEQ ID NO: 535 - protein, 276 aa, Homo sapiens
PKVFFNILEEARELALQQEEGKTVMYTAVGSEWRPFGYPRRRQPLNSVVLQQGLADRIVRDVQEFIDNPKWYTDRGIPYRRGYLLYGPPGCGKSSFITALAGELEHSICLLSLTDSSLSDDRLNHLLSVAPQQSLVLLEDVDAAFLSRDLAVENPVKYQGLGRLTFSGLLNALDGVASTEARIVFMTTNHVDRLDPALIRPGRVDLKEYVGYCSHWQLTQMFQRFYPGQAPSLAENFAEHVLRATNQISPAQVQGYFMLYKNDPVGAIHNAESLRR

SEQ ID NO: 536 - protein, 72 aa, Homo sapiens
IKCSTMCNDCKFSKILQPFHECFTIQHSIYYKTPFLYPYTSGVAVNIYYDIYFNQNVTHIKCLFFKMNVLCF

SEQ ID NO: 537 - protein, 241 aa, Homo sapiens
AYISCPSSTVNKWHACVLWPFYLEYSLLAEFTLVVKQKLPGVYVQPSYRSALMWFGVIFIRHGLYQDGVFKFTVYIPDNYPDGDCPRLVFDIPVFHPLVDPTSGELDVKRAFAKWRRNHNHIWQVLMYARRVFYKIDTASPLNPEAAVLYEKDIQLFKSKVVDSVKVCTARLFDQPKIEDPYAISFSPWNPSVHDEAREKMLTQKKKPEEQHNKSVHVAGLSWVKPGSVQPFSKEEKTVAT

SEQ ID NO: 538 - protein, 47 aa, Homo sapiens
  SITE (20): Xaa equals any of the naturally occurring L-amino acids
  SITE (23): Xaa equals any of the naturally occurring L-amino acids
  SITE (29): Xaa equals any of the naturally occurring L-amino acids
  SITE (36): Xaa equals any of the naturally occurring L-amino acids
  SITE (47): Xaa equals any of the naturally occurring L-amino acids
FYMAVIHGVEAVRKESSTSXLSXVSSDCXEKWDCLXHGICGLKSSPX

SEQ ID NO: 539 - protein, 74 aa, Homo sapiens
  SITE (1): Xaa equals any of the naturally occurring L-amino acids
  SITE (15): Xaa equals any of the naturally occurring L-amino acids
  SITE (45): Xaa equals any of the naturally occurring L-amino acids
  SITE (54): Xaa equals any of the naturally occurring L-amino acids
  SITE (55): Xaa equals any of the naturally occurring L-amino acids
XVFVNKCICITQSCXIQNYKQKLCKTKLKAACLLFFVPCPITTSXSKNEMLLLXXLMFFRFEGFTTSTPKTYFS

SEQ ID NO: 540 - protein, 195 aa, Homo sapiens
STAQGNLLTVFIQPRASMSGGKYVDSEGHLYTVPIREQGNIYKPNNKAMADELSEKQVYDAHTKEIDLVNRDPKHLNDDVVKIDFEDVIAEPEGTHSFDGIWKASFTTFTVTKYWFYRLLSALFGIPMALIWGIYFAILSFLHIWAVVPCIKSFLIEIQCISRVYSIYVHTVCDPLFEAVGKIFSNVRINLQKEI

SEQ ID NO: 541 - protein, 233 aa, Homo sapiens
LPLEVAMAGLRREYAFKAINQGGLTSVAVRGKDCAVIVTQKKVPDKLLDSSTVTHLFKITENIGCVMTGMTADSRSQVQRARYEAANWKYKYGYEIPVDMLCKRIADISQVYTQNAEMRPLGCCMILIGIDEEQGPQVYKCDPAGYYCGFKATAAGVKQTESTSFLEKKVKKKFDWTFEQTVETAITCLSTVLSIDFKPSEIEVGVVTVENPKFRILTEAEIDAHLVALAERD

SEQ ID NO: 542 - protein, 235 aa, Homo sapiens
  SITE (123): Xaa equals any of the naturally occurring L-amino acids
  SITE (214): Xaa equals any of the naturally occurring L-amino acids
  SITE (215): Xaa equals any of the naturally occurring L-amino acids
TLQPPTGIPSTLPLCTISTLWAPTKYLSAIWAVGQIIQDYDSDKMFPALGFGAQLPPDWKVSHEFAINFNPTNPFCSGVDGIAQAYSACLPHIRFYGPTNFSPIVNHVARFAAQATQQRTATXYFILLIITDGVISDMEETRHAGCRLPSCPCPSSSWAWAMRTSLPWSSWMGTAACCASHTGEGGSPRYCGIRSLFEISAKQQKRTWPKLCWXXWPQQLLHYFKHKKLAPQQIR

SEQ ID NO: 543 - protein, 73 aa, Homo sapiens [sequence omitted]

SEQ ID NO: 544 - protein, 102 aa, Homo sapiens
  SITE (59): Xaa equals any of the naturally occurring L-amino acids
  SITE (77): Xaa equals any of the naturally occurring L-amino acids
  SITE (81): Xaa equals any of the naturally occurring L-amino acids
  SITE (87): Xaa equals any of the naturally occurring L-amino acids
  SITE (91): Xaa equals any of the naturally occurring L-amino acids
  SITE (102): Xaa equals any of the naturally occurring L-amino acids
AWTESIHSDHLLSLYTENKTSSTHPIRFFCLTFKCPCWPFTAVPRHQASCHISHSKGFXTISSCHFLKKTIPKLKLXISVXSCVCQXLGFXWKVPKTKATPX

SEQ ID NO: 545 - protein, 115 aa, Homo sapiens
FRFLSDCGVFAEGHIELQVESGVPLGFSTMAEDMETKIKNYKTAPFDSRFPNQNQTRNCWQNYLDFHRCQKAMTAKGGDISVCEWYQRVYQSLCPTSWVTDWDEQRAEGTFPGKI

SEQ ID NO: 546 - protein, 112 aa, Homo sapiens
  SITE (8): Xaa equals any of the naturally occurring L-amino acids
  SITE (11): Xaa equals any of the naturally occurring L-amino acids
  SITE (19): Xaa equals any of the naturally occurring L-amino acids
PSGCPIPXPWXISVVSACXMGDPHPQCPSPSWGPLTLHPLPFPPHLPGEKLDMGPGEGSWPEEDPFPVALEGGGVAGAPTHSPSLQTPNPQSVFEPPRSPHAPAHAPSVNPW

SEQ ID NO: 547 - protein, 221 aa, Homo sapiens
  SITE (29): Xaa equals any of the naturally occurring L-amino acids
  SITE (40): Xaa equals any of the naturally occurring L-amino acids
  SITE (118): Xaa equals any of the naturally occurring L-amino acids
  SITE (126): Xaa equals any of the naturally occurring L-amino acids
  SITE (132): Xaa equals any of the naturally occurring L-amino acids
  SITE (177): Xaa equals any of the naturally occurring L-amino acids
GLSESAPSRLVGAQPSTGVPLVTGYTTYXAHHSAFSQMVXSFYYGGKLVGQATTTCPEGCRLSLSQPGLPGTKLYGPEGLELVRFPPADAIPSERQRQVTRNCSGTWSAGCCCTAAGXACSSSGCXRAACSXAATVGVQRQAQQAGADEVVQVFDTSQFFRELQQFYNSQGRLPDGXVVLCFGEEFRIWPPCAPNSFSCRLSSCMSGNWQKRLGRAVEPAL

SEQ ID NO: 548 - protein, 231 aa, Homo sapiens
  SITE (44): Xaa equals any of the naturally occurring L-amino acids
  SITE (205): Xaa equals any of the naturally occurring L-amino acids
  SITE (212): Xaa equals any of the naturally occurring L-amino acids
  SITE (226): Xaa equals any of the naturally occurring L-amino acids
KGFFPQLRREANLVATCLPVRASLPHRLNMLRGPGPGLLLLAVXCLGTAVPSTGASKSKRQAQQMVQPQSPVAVSQSKPGCYDNGKHYQINQQWERTYLGNALVCTCYGGSRGFNCESKPEAEETCFDKYTGNTYRVGDTYERPKDSMIWDCTCIGAGRGRISCTIANRCHEGGQSYKIGDTWRRPHETGGYMLECVCLGNGKGXWTCKPIXEKCLIMLLGLLCGXRTWEK

SEQ ID NO: 549 - protein, 82 aa, Homo sapiens
EAGTPGSQTRADPIVKYFYIFSFPQKRSLTYCFIDSLAVRGSFPEVGRRGSGVAVSCLPSQVVTLVMDCLSPSFHPGETVQI

SEQ ID NO: 550 - protein, 113 aa, Homo sapiens
GLVGERTQERGVQESRLSELCGVCGWQGQPLQPLKTLKARDSWRRLGLPGSSSKYPGASELPGCYMAQGTQVQGRTGKTRYPMCKVKTLGSLLNDEEFKTVTALRHPWGQRSA

SEQ ID NO: 551 - protein, 305 aa, Homo sapiens
  SITE (300): Xaa equals any of the naturally occurring L-amino acids
PAIAMARGKAKEEGSWKKFIWNSEKKEFLGRTGGSWFKILLFYVIFYGCLAGIFIGTIQVMLLTISEFKPTYQDRVAPPGLTQIPQIQKTEISFRPNDPKSYEAYVLNIVRFLEKYKDSAQRDDMIFEDCGDVPSEPKERGDFNHERGERKVCRFKLEWLGNCSGLNDETYGYKEGKPCIIIKLNRVLGFKPKPPKNESLETYPVMKYNPNVLPVQCTGKRDEDKDKVGNVEYFGLGNSPGFPLQYYPYYGKLLQPKYLQPLLAVQFTNLTMDTEIRIECKAYGENIGYSEKDRFQGRFXVCGSF

SEQ ID NO: 552 - protein, 106 aa, Homo sapiens
APRGCSMPHRKKKPFIEKKKAVSFHLVHRSQRDPLAADESAPQRVLLPTQKIDNEERRAEQRKYGVFFDDDYDYLQHLKEPSGPSELIPSSTFSAHNRREEKEETL

SEQ ID NO: 553 - protein, 235 aa, Homo sapiens
HTLSRWTKHSIPRWNDARTDDTWHSELDMRKIGQARNTLMDMRLSQVSDSVSGQTVVDPKGYLTDLNSMIPTHGGDINDIKKARLLLKSVRETNPHHPPAWIASARLEEVTGKLQVARNLIMKGTEMCPKSEDVWLEAARLQPGDTAKAVVAQAVRHLPQSVRIYIRAAELETDIRAKKRVLRKALEHVPNSVRLWKAAVELEEPEDARIMLSRAVECCPTSVELWLCSGKAGDL

SEQ ID NO: 554 - protein, 61 aa, Homo sapiens
LWFCHNIRIYKHFKSILFFCFHFRNIHVLNKSCVLISLLCNNLVCLTFLTFISNICFIIEQ

SEQ ID NO: 555 - protein, 684 aa, Homo sapiens
  SITE (151): Xaa equals any of the naturally occurring L-amino acids
  SITE (683): Xaa equals any of the naturally occurring L-amino acids
RGKGFKEFFLGVCQTFIPCLCAEGIQLQFFCSGSGSSPLLKDLESMKTGLFFLCLLGTAAAIPTNARLLSDHSKPTAETVAPDNTAIPSLRAEAEENEKETAVSTEDDSHHKAEKSSVLKSKEESHEQSAEQGKSSSQELGLKDQEDSDGXLSVNLEYAPTEGTLDIKEDMSEPQEKKLSENTDFLAPGVSSFTDSNQQESITKREENQEQPRNYSHHQLNRSSKHSQGLRDQGNQEQDPNISNGEEEEEKEPGEVGTHNDNQERKTELPREHANSKQEEDNTQSDDILEESDQPTQVSKMQEDEFDQGNQEQEDNSNAEMEEENASNVNKHIQETEWQSQEGKTGLEAISNHKETEEKTVSEALLMEPTDDGNTTPRNHGVDDDGDDDGDDGGTDGPRHSASDDYFIPSQAFLEAERAQSIAYHLKIEEQREKVHENENIGTTEPGEHQEAKKAENSSNEEETSSEGNMRVHAVDSCMSFQCKRGHICKADQQGKPHCVCQDPVTCPPTKPLDQVCGTDNQTYASSCHLFATKCRLEGTKKGHQLQLDYFGACKSIPTCTDFEVIQFPLRMRDWLKNILMQLYEANSEHAGYLNEKQRNKVKKIYLDEKRLLAGDHPIDLLLRDFKKNYHMYVYPVHWQFSELDQHPMDRVLTHSELAPLRASLVPMEHCITRFFEECDPNXG

SEQ ID NO: 556 - protein, 61 aa, Homo sapiens
LVLILLAGINNPKSVQTLGAKCSTQFGILCLKIYFIVTAPCIYSWPRTELLQVTWNFHSKS

SEQ ID NO: 557 - protein, 142 aa, Homo sapiens
  SITE (115): Xaa equals any of the naturally occurring L-amino acids
  SITE (117): Xaa equals any of the naturally occurring L-amino acids
  SITE (122): Xaa equals any of the naturally occurring L-amino acids
  SITE (124): Xaa equals any of the naturally occurring L-amino acids
  SITE (130): Xaa equals any of the naturally occurring L-amino acids
  SITE (137): Xaa equals any of the naturally occurring L-amino acids
  SITE (142): Xaa equals any of the naturally occurring L-amino acids
EIANMPNSEPASLLELFNSIATQGELVRSLKAGNASKDEIDSAVKMLVSLKMSYKAAAGEDYKADCPPGNPAPTSNHGPDATEAEEDFVDPWTVQTSSAKGIDYDKLIVRFGSSXNXQELLXDXESTAKXTHSGQGXFFKRX

SEQ ID NO: 558 - protein, 475 aa, Homo sapiens
EIANMPNSEPASLLELFNSIATQGELVRSLKAGNASKDEIDSAVKMLVSLKMSYKAAAGEDYKADCPPGNPAPTSNHGPDATEAEEDFVDPWTVQTSSAKGIDYDKLIVRFGSSKIDKELINRIERATGQRPHHFLRRGIFFSHRDMNQVLDAYENKKPFYLYTGRGPSSEAMHVGHLIPFIFTKWLQDVFNVPLVIQMTDDEKYLWKDLTLDQAYSYAVENAKDIIACGFDINKTFIFSDLDYMGMSSGFYKNVVKIQKHVTFNQVKGIFGFTDSDCIGKISFPAIQAAPSFSNSFPQIFRDRTDIQCLIPCAIDQDPYFRMTRDVAPRIGYPKPALLHSTFFPALQGAQTKMSASDPNSSIFLTDTAKQIKTKVNKHAFSGGRDTIEEHRQFGGNCDVDVSFMYLTFFLEDDDKLEQIRKDYTSGAMLTGELKKALIEVLQPLIAEHQARRKEVTDEIVKEFMTPRKLSFDFQ

SEQ ID NO: 559 - protein, 265 aa, Homo sapiens
  SITE (4): Xaa equals any of the naturally occurring L-amino acids
WIPXLQIRTGESYCCGLRGRRPCRSTSTSAGKLRRRTAPRGSREAHGVQALRGGWPGGYVSFGPHAGKLVAIVDVIDQNRALVDGPCTQVRRQAMPFKCMQLTDFILKFPHSAHQKYVRQAWQKADINTKWAATRWAKKIEARERKAKMTDFDRFKVMKAKKMRNRIIKNEVKKLQKAALLKASPKKAPGTKGTAAAAAAAAAAAAAAAKVPAKKITAASKKAPAQKVPAQKATGQKAAPAPKAQKGQKAPAQKAPAPKASGKKA

SEQ ID NO: 560 - protein, 41 aa, Homo sapiens
PNLIPVSRDWEGRAAAGGQAGSACEGEELWTSASLPRERVR

SEQ ID NO: 561 - protein, 48 aa, Homo sapiens
KHKNKNISDNNIEKTKIHGLEFHPRDCILKDTGFSSFFFFFSFHVSVL

SEQ ID NO: 562 - protein, 168 aa, Homo sapiens
EPWPSPKKARSGRWLRNGFKRKMEEPEEPADSGQSLVPVYIYSPEYVSMCDSLAKIPKRASMVHSLIEAYALHKQMRIVKPKVASMEEMATFHTDAYLQHLQKVSQEGDDDHPDSIEYGLGYDCPATEGIFDYAAAIGGATITAAQCLIDGMCKVAINWSGRWHHAKK

SEQ ID NO: 563 - protein, 352 aa, Homo sapiens
GSFQRCKKGQRLFPMAEGNHRKKPLKVLESLGKDFLTGVLDNLVEQNVLNWKEEEKKKYYDAKTEDKVRVMADSMQEKQRMAGQMLLQTFFNIDQISPNKKAHPNMEAGPPESGESTDALKLCPHEEFLRLCKERAEEIYPIKERNNRTRLALIICNTEFDHLPPRNGADFDITGMKELLEGLDYSVDVEENLTARDMESALRAFATRPEHKSSDSTFLVLMSHGILEGICGTVHDEKKPDVLLYDTIFQIFNNRNCLSLKDKPKVIIVQACRGANRGELWVRDSPASLEVASSQSSENLEEDAVYKTHVEKDFIAFCSSTPHNVPGETAQWALSSSHNSSHASRNILGAAT

SEQ ID NO: 564 - protein, 318 aa, Homo sapiens
RFYRSRKKHLITTQTEHKCVLDSCRSLEAEGFQVTYLPVQKSGIIDLKELEAAIQPDTSLVSVMTVNNEIGVKQPIAEIGRICSSRKVYFHTDAAQAVGKIPLDVNDMKIDLMSISGHKIYGPKGVGAIYIRRRPRVRVEALQSGGGQERGMRSGTVPTPLVVGLGAACEVAQQEMEYDHKRISKLSERLIQNIMKSLPDVVMNGDPKHHYPGCINLSFAYVEGESLLMALKDVALSSGSACTSASLEPSYVLRAIGTDEDLAHSSIRFGIGRFTTEEEVDYTVEKCIQHVKRLREMSPLWEMVQDGIDLKSIKWTQH

SEQ ID NO: 565 - protein, 418 aa, Homo sapiens
  SITE (8): Xaa equals any of the naturally occurring L-amino acids
  SITE (367): Xaa equals any of the naturally occurring L-amino acids
  SITE (383): Xaa equals any of the naturally occurring L-amino acids
ESTESLTXEGTDMNEGQLLGDFEIESKQLEAESWSRIIDSKFLKQQKKDVVKRQEVIYELMQTEFHHVRTLKIMSGVYSQGMMADLLFEQQMVEKLFPCLDELISIHSQFFQRILERKKESLVDKSEKNFLIKRIGDVLVNQFSGENAERLKKTYGKFCGQHNQSVNYFKDLYAKDKRFQAFVKKKMSSSVVRRLGIPECILLVTQRITKYPVLFQRILQCTKDNEVEQEDLAQSLSLVKDVIGAVDSKVASYEKKVRLNEIYTKTDSKSIMRMKSGQMFAKEDLKRKKLVRDGSVFLKNAAGRLKEVQAVLLTDILVFLQEKDQKYIFASLDQKSTVISLKKLIVREVAHEEKGLFLISMGMTDPXMVEVHASSKEERNSWXQIIQDTINTRTEMKMKEFLVRMRKKRKCWTPEPEN

SEQ ID NO: 566 - protein, 123 aa, Homo sapiens
  SITE (52): Xaa equals any of the naturally occurring L-amino acids
PQCLQKHFAKIRDRSTSGGKMKVNGAPREDARPVPQGSCQSELHRALERLAXSQSRTHEDLYIIPIPNCDRNGNFHPKQCHPALDGQRGKCWCVDRKTGVKLPGGLEPKGELDCHQLADSFRE

SEQ ID NO: 567 - protein, 305 aa, Homo sapiens
  SITE (162): Xaa equals any of the naturally occurring L-amino acids
  SITE (214): Xaa equals any of the naturally occurring L-amino acids
  SITE (266): Xaa equals any of the naturally occurring L-amino acids
GSLLMKIELSMQPWNPGYSSEGATAQETYTCPKMIEMEQAEAQLAELDLLASMFPGENELIVNDQLAVAELKDCIEKKTMEGRSSKVYFTINMNLDVSDEKMAMFSLACILPFKYPAVLPEITVRSVLLSRSQQTQLNTDLTAFLQKHCHGDVCILNATEWXREHASGYVSRDTSSSPTTGSTVQSVDLIFTRLWIYSHHIYNKCKRKNILEWXKELSLSGFSMPGKPGVVCVEGPQSACEEFWSRLRKLNSEENFNSPSEKTFLXMVQMMKRKDKGNFPFLKKKCSVLMEPGETTWTLVSSISS

SEQ ID NO: 568 - protein, 596 aa, Homo sapiens
QERDGAKMAAADGDDSLYPIAVLIDELRNEDVQLRLNSIKKLSTIALALGVERTRSELLPFLTDTIYDEDEVLLALAEQLGTFTTLVGGPEYVHCLLPPLESLATVEETVVRDKAVESLRAISHEHSPSDLEAHFVPLVKRLAGGDWFTSRTSACGLFSVCYPRVSSAVKAELRQYFRNLCSDDTPMVRRAAASKLGEFAKVLELDNVKSEIIPMFSNLASDEQDSVRLLAVEACVNIAQLLPQEDLEALVMPTLRQAAEDKSWRVRYMVADKFTELQKAVGPEITKTDLVPAFQNLMKDCEAEVRAAASHKVKEFCENLSADCRENVIMSQILPCIKELVSDANQHVKSALASVIMGLSPILGKDNTIEHLLPLFLAQLKDECPEVRLNIISNLDCVNEVIGIRQLSQSLLPAIVELAEDAKWRVRLAIIEYMPLLAGQLGVEFFDEKLNSLCMAWLVDHVYAIREAATSNLKKLVEKFGKEWAHATIIPKVLAMSGDPNYLHRMTTLFCINVLSEVCGQDITTKHMLPTVLRMAGDPVANVRFNVAKSLQKIGPILDNSTLQSEVKPILEKLTQDQDVDVKYFAQEALTVLSLA

SEQ ID NO: 569 - protein, 93 aa, Homo sapiens
STVWTRNVPCHHAMKYCYRFNIAHLCRMNSGGLPQVTVRTVDGEIADALLSRFSVTFSMFITQWVFINMLIKLFTGPVIVLNSCSFVFHCLDV

SEQ ID NO: 570 - protein, 59 aa, Homo sapiens
  SITE (1): Xaa equals any of the naturally occurring L-amino acids
  SITE (19): Xaa equals any of the naturally occurring L-amino acids
XQLDYREYLESYLSYPLLXNMKSHALDILYIIRFLLCFWLCCPPSPWGDIWEQTYLDLE

SEQ ID NO: 571 - protein, 132 aa, Homo sapiens
IIYFQCFLHVLICSFSQLNAPTGLSPVSIQSVEIKDSSFLLISILVSILNLETSCFYDISHLIFFIFYLRNMKKKYTKMVKLLHKSAPAQSDSCKCPFICCVCISRISIGSRSGYQYIMHRSVGCLKAKQEN

SEQ ID NO: 572 - protein, 145 aa, Homo sapiens [sequence omitted]

SEQ ID NO: 573 - protein, 286 aa, Homo sapiens
VISERLSACPPSRRVAGACASRSTSLLLSRPRPGGPEREAGTMFRRKLTALDYHNPAGFNCKDETEFRNFIVWLEDQKIRHYKIEDRGNLRNIHSSDWPKFFEKYLRDVNCPFKIQDRQEAIDWLLGLAVRLEYGDNAEKYKDLVPDNSKTADNATKNAEPLINLDVNNPDFKAGVMALANLLQIQRHDDYLVMLKAIRILVQERLTQDAVAKANQTKEGLPVALDKHILGFDTGDAVLNEAAQILRLLHIEELRELQTKINEAIVAVQAIIADPKTDHRLGKVGR

SEQ ID NO: 574 - protein, 63 aa, Homo sapiens [sequence omitted]

SEQ ID NO: 575 - protein, 189 aa, Homo sapiens
  SITE (155): Xaa equals any of the naturally occurring L-amino acids
  SITE (165): Xaa equals any of the naturally occurring L-amino acids
ASLPWSSYEQEKEALTHSFREASSTQQETIDRLTSQLEAFQAKMKRVEESILSRNYKKHIQDYGSPSQFWEQELESLHFVIEMKNERIHELDRRLILMETVKEKNLILEEKITTLQQENEDLHVRSRNQVVLSRQLSEDLLLTREALEKEVQLRXQLQQEKEELXYRVLGANASPAFPLAPVTPTGKGG

SEQ ID NO: 576 - protein, 153 aa, Homo sapiens
RLLRDADDLQKRLAVYQAGAREGAERGLSAIRERLGPLVEQGRVRAATVGSLAGQPLQERAQAWGERLRARMEEMGSRTRDRLDEVKEQVAEVRAKLEEQAQQIRLQAEAFQARLKSWFEPLVEDMQRQWAGLVEKVQAAVGTSAAPVPSDNH

SEQ ID NO: 577 - protein, 48 aa, Homo sapiens
TEITPLHSSLAKKLPKNEPQNPGANSARGRGVDLTEPTQPTRNQCCSN

SEQ ID NO: 578 - protein, 98 aa, Homo sapiens
  SITE (41): Xaa equals any of the naturally occurring L-amino acids
  SITE (66): Xaa equals any of the naturally occurring L-amino acids
  SITE (93): Xaa equals any of the naturally occurring L-amino acids
KTIQDPLAATLFSSSLLNSISKIGNRARRIPSTQPSAWHKXVGTIKFSMGWEHGYSLGCHRKGVGXHRSHIHLISWDVPLHRGNTNFRGFWGXGLGSD

SEQ ID NO: 579 - protein, 194 aa, Homo sapiens
TYNIKMASKRALVILAKGAEEMETVIPVDVMRRAGIKVTVAGLAGKDPVQCSRDVVICPDASLEDAKKEGPYDVVVLPGGNLGAQNLSESAAVKEILKEQENRKGLIAAICAGPTALLAHEIGFGSKVTTHPLAKDKMMNGGHYTYSENRVEKDGLILTSRGPGTSFEFALAIVEALNGKEVAAQVKAPLVLKD

SEQ ID NO: 580 - protein, 192 aa, Homo sapiens
DPRRPPTRPWGLPRAPATARTRGRSLNIPLTTRRRPATEAPSTLSPHIVSPSGFLGFSVFSSFFFFLTRSVLPVNQGSVSVSVGSGSRAFFPFALILRKAEPLGCGGRGQGHIPIRVGRGSLLAHSGCAGKKRPGLGRNRSPTVSGCLASSPFCQLSSLWFLCPQVSGSIHKRKIHFFPQGWGKDSGESARK

SEQ ID NO: 581 - protein, 112 aa, Homo sapiens
KNKQNYVARLTVVMFICHRSKVHKVYQIYIYLGYLDRLLLFFFYLSLQEFGNSLSLFLILKILNCNSFLLPNVCVHIQSNETISSHTTTGVGTFSQILMCLYVNRCLYEIFS

SEQ ID NO: 582 - protein, 80 aa, Homo sapiens [sequence omitted]

SEQ ID NO: 583 - protein, 424 aa, Homo sapiens [sequence omitted]

SEQ ID NO: 584 - protein, 64 aa, Homo sapiens
RLASDNTGIIVNNVKLRFLASIKGAVSEMALSCQSFLFTFFFCPECICEESLILCFVEISTQPQ

SEQ ID NO: 585 - protein, 194 aa, Homo sapiens
  SITE (5): Xaa equals any of the naturally occurring L-amino acids
LVLKXKIIGISLLSGLLHRAFSVFLFNTENKLLLQQRSDAKITFPGCFTNTCCSHPLSNPAELEESDALGVRRAAQRRLKAELGIPLEEVPPEEINYLTRIHYKAQSDGIWGEHEIDYILLVRKNVTLNPDPNEIKSYCYVSKEELKELLKKAASGEIKITPWFKIIAATFLFKWWDNLNHLNQFVDHEKIYRM

SEQ ID NO: 586 - protein, 243 aa, Homo sapiens
PAATTSSSLLALHRVLPFQYVPSDETISSAESFSTMWKWILTHCASAFPHLPGCCCCCFLLLFLVSSVPVTCQALGQDMVSPEATNSSSSSFSSPSSAGRHVRSYNHLQGDVRWRKLFSFTKYFLKIEKNGKVSGTKKENCPYSILEITSVEIGVVAVKAINSNYYLAMNKKGKLYGSKEFNNDCKLKERIEENGYNTYASFNWQHNGRQMYVALNGKGAPRRGQKTRRKNTSAHFLPMVVHS

SEQ ID NO: 587 - protein, 366 aa, Homo sapiens
  SITE (44): Xaa equals any of the naturally occurring L-amino acids
  SITE (120): Xaa equals any of the naturally occurring L-amino acids
  SITE (129): Xaa equals any of the naturally occurring L-amino acids
  SITE (132): Xaa equals any of the naturally occurring L-amino acids
SHCLKKNLSKRSLQFLGKQSILSVRLEQCPLQLNNPFNEYSKFXGKGHVGTTATKKIDVYLPLHSSQDRLLPMTVVTMASARVQDLIGLICWQYTSEDGSRSSMTMSVPTACILLRMMGXWTPIFPRWXPMXPIHKFGFSTLALVEKYSSPGLTSKESLFVRINAAHGFSLIQVDNTKVTMKEILLKAVKRRKGSQKVSGSRADGVFEEDSQIDIATVQDMLSSHHYKSFKVSMIHRLRFTTDVQLGISGDKVEIDPVTNQKASTKFWIKQKPISIDSDLLCACDLAEEKSPSHAIFKLTYLSNHDYKHLYFESDAATVNEIVLKVNYILESRASTARADYFAQKQRKLNRRTSFSFQKEKKSGQQ

SEQ ID NO: 588 - protein, 109 aa, Homo sapiens
CCKSGWAIHSLSELTELELAVKCSAETEHLTDIFLQKMVLGNKIITIREWLVVSTVANANCWNSLYCRKTQTETLKFCLAMCFWYETNYCVTVQVGNNSFNWVFSINGN

SEQ ID NO: 589 - protein, 74 aa, Homo sapiens
SCRRGRDHSGSGVGTAMAGALVRKAADYVRSKDFRDYLMSTHFWGPVANWGLPIAAINDMKKSPEIISGRMTFG

SEQ ID NO: 590 - protein, 125 aa, Homo sapiens
VIMYILQSGGWQDGDIEHDCSLSLFSAYGYLSSISICIFSSFHFRKQSCQLKQKKKKKKSSRQHTVESCTHTSAQARCLAEPQSGKRVPASGFLGINFITVYLSHCGHAIWQGENGRLGLLCEAV

SEQ ID NO: 591 - protein, 359 aa, Homo sapiens
  SITE (14): Xaa equals any of the naturally occurring L-amino acids
PVFFSLLLLQKQWXCLLDSKWAKAKKGEEALFTTRESVVDYCNRLLKKQFFHRALKVMKMKYDKDIKKEKDKGKAESGKEEDKKSKKENIKDEKTKKEKEKKKDGEKEESKKEETPGTPKKKETKKKFKLEPHDDQVFLDGNEVYVWIYDPVHFKTFVMGLILVIAVIAATLFPLWPAEMRVGVYYLSVGAGCFVASILLLAVARCILFLIIWLITGGRHHFWFLPNLTADVGFIDSFRPLYTHEYKGPKADLKKDEKSETKKQQKSDSEEKSDSEKKEDEEGKVGPGNHGTEGSGGERHSDTDSDRREDDRSQHSSGNGNDFEMITKEELEQQTDGDCEEDEEEENDGETPKSSHEKS

SEQ ID NO: 592 - protein, 111 aa, Homo sapiens
  SITE (27): Xaa equals any of the naturally occurring L-amino acids
VLCQNCQSVVEYSKNNKGCEQSRMVFXLYSRDSGPPPSTVSEAEFEDIMKRNRAISSSPISKAVSGASAGDYSDAIETLLTAIAVIKQSRVANDERCRVLISSLKDCLHGH

SEQ ID NO: 593 - protein, 162 aa, Homo sapiens
  SITE (58): Xaa equals any of the naturally occurring L-amino acids
  SITE (85): Xaa equals any of the naturally occurring L-amino acids
  SITE (158): Xaa equals any of the naturally occurring L-amino acids
KTGKILANMELPGSSLNILTVYAREHTFSFENSASSKPPPTIGYHFYGPSGDASELWXKNGDLLTMKEYHCLLQLLCPDFPLELXQKAARIVLMDDAMDCLMSFSDFLFAFQIQFYYSEFLDSVAAIYEDLLSGKNPNTVIGADLVQWAAPPRPALGXARHA

SEQ ID NO: 594 - protein, 195 aa, Homo sapiens
SVASSRGTACDLPARGPMLPAAARPLWGPCLGLRAAAFRLARRQVPCVCAVRHMRSSGHQRCEALAGAPLDNAPKEYPPKIQQLVQDIASLTLLEISDLNELLKKTLKIQDVGLVPMGGVMSGAVPAAAAQEAVEEDIPIAKERTHFTVRLTEANRGQSEADQGNQELHPRHQPRPGKEAGGVPAPGNQSQCRQS

SEQ ID NO: 595 - protein, 99 aa, Homo sapiens
APQWQVHLQVPGLYYFTYHASSRGNLCVNLMRGRERAQKVVTFCDYAYNTFQVTTGGMVLKLEQGENVFLQATDKNSLLGMEGANSIFSGFLLFPDMEA

SEQ ID NO: 596 - protein, 254 aa, Homo sapiens
  SITE (105): Xaa equals any of the naturally occurring L-amino acids
AEDPAGGLAGQDTMFARGLKRKCVGHEEDVEGALAGLKTVSSYSLQRQSLLDMSLVKLQLCHMLVEPNLCRSVLIANTVRQIQEEMTQDGTWRTVAPQAAERAPXDRLVSTEILCRAAWGQEGAHPAPGLGDGHTQGPVSDLCPVTSAQAPRHLQSSAWEMDGPRENRGSFHKSLDQIFETLETKNPSCMEELFSDVDSPYYDLDTVLTGMMGGARPGPCEGLEGLAPATPGPSSSCKSDLGELDHVVEILVET

SEQ ID NO: 597 - protein, 115 aa, Homo sapiens
  SITE (10): Xaa equals any of the naturally occurring L-amino acids
CSMVPSSASXQVRSHYVDWRMWRDVKRRKMAYEYADERLRINSLRKNTILPKILQDVADEEIAALPRDSCPVRIRNRCVMTSRPRGVKRRWRLSRIVFRHLADHGQLSGIQRATW

SEQ ID NO: 598 - protein, 99 aa, Homo sapiens
ARPCMNSTKALPHGREHTRLKMLSYLKNKMCKSSGWHKTKVNASWGTFLRGLAECVNIIDFCLCYMTSVTSLKICTIQFQLWITSVDLCEGFYLCRMGV

SEQ ID NO: 599 - protein, 151 aa, Homo sapiens
  SITE (56): Xaa equals any of the naturally occurring L-amino acids
RAELLGCRHYEVARLLKELPRGRTFTLKLTEPRKAFDMISQRSAGGRPGSGPQLGXGRGTLRLRSRGPATVEDLPSAFEEKAIEKVDDLLESYMGIRDTELAATMVELGKDKRNPDELAEALDERLGDFAFPDEFVFDVWGAIGDAKVGRY

SEQ ID NO: 600 - protein, 315 aa, Homo sapiens
STHASGASGGAQVAGRLGLGCPLHLHVFAVVSAMLPLLRCVPRVLGSSVAGLRAAAPASPFRQLLQPAPRLCTRPFGLLSVRAGSERRPGLLRPRGPCACGCGCGSLHTDGDKAFVDFLSDEIKEERKIQKHKTLPKMSGGWELELNGTEAKLVRKVAGEKITVTFNINNSIPPTFDGEEEPSQGQKVEEQEPELTSTPNFVVEVIKNDDGKKALVLDCHYPEDEVGQEDEAESDIFSIREVSFQSTGESEWKDTNYTLNTDSLDWALYDHLMDFLADRGVDNTFADELVELSTALEHQEYITFLEDLKSFVKSQ

SEQ ID NO: 601 - protein, 167 aa, Homo sapiens
GRGSAKKRPLPLVGIGMSKNTVSSARFRKVDVDEYDENKFVDEEDGGDGQAGPDEGEVDSCLRQGNMTAALQAALKNPPINTKSQAVKDRAGSIVLKVLISFKANDIEKAVQSLDKNGVDLLMKYIYKGFESPSDNSSAMLLQWHEKALAAGGVGSIVRVLTARKTV

SEQ ID NO: 602 - protein, 78 aa, Homo sapiens
LCFCLPPDYLYCGFKYATFSQHPIIMAPQFICGHPGFRARSLALYKCIHKISELVGHEHQTFVPLIWLCLEKTANQKE

SEQ ID NO: 603 - protein, 47 aa, Homo sapiens
AHASAWLLSEKKGVWGVFYKAAVIGTRLHAAVAIACVVMAFYVLFIK

SEQ ID NO: 604 - protein, 227 aa, Homo sapiens
VGGASRLLLRISVDLMEAKTLGTVTPRKPVLSVSARKIKDNAADWHNLILKWETLNDAGFTTANNIANLKISLLNKDKIELDSSSPASKENEEKVCLEYNEELEKLCEELQATLDGLTKIQVKMEKLSSTTKGICELENYHYGEESKRPPLFHTWPTTHFYEVSHKLLEMYRKELLLKRTVAKELAHTGDPDLTLSYLSMWLHQPYVESDSRLHLESMLLETGHRAL

SEQ ID NO: 605 - protein, 119 aa, Homo sapiens
  SITE (76): Xaa equals any of the naturally occurring L-amino acids
  SITE (92): Xaa equals any of the naturally occurring L-amino acids
  SITE (104): Xaa equals any of the naturally occurring L-amino acids
NEIHWAAVHWARPCSSGGFHDASHIQCFPSKPHPCRSAVLPQQAFALSGSLLWFLSEILFIFFLITALLRYNSHAXQFTYTVYNSVVFTIFXVVQLSFFSPPKXTLCPLVFTLFSHNSR

SEQ ID NO: 606 - protein, 406 aa, Homo sapiens
VVRLQRLFPGRTMDSQGRKVVVCDNGTGFVKCGYAGSNFPEHIFPALVGRPIIRSTTKVGNIEIKDLMVGDEASELRSMLEVNYPMENGIVRNWDDMKHLWDYTFGPEKLNIDTRNCKILLTEPPMNPTKNREKIVEVMFETYQFSGVYVAIQAVLTLYAQGLLTGVVVDSGDGVTHICPVYEGFSLPHLTRRLDIAGRDITRYLIKLLLLRGYAFNHSADFETVRMIKEKLCYVGYNIEQEQKLALETTVLVESYTLPDGRIIKVGGERFEAPEALFQPHLINVEGVGVAELLFNTIQAADIDTRSEFYKHIVLSGGSTMYPGLPSRLERELKQLYLERVLKGDVEKLSKFKIRIEDPPRRKHMVFLGGAVLADIMKDKDNFWMTRQEYQEKGVRVLEKLGVTVR

SEQ ID NO: 607 - protein, 221 aa, Homo sapiens
  SITE (36): Xaa equals any of the naturally occurring L-amino acids
GSGGNHSVCCDTMEGGGGSGNKTTGGLAGFFGAGGXGYSHADLAGVPLTGMNPLSPYLNVDPRYLVQDTDEFILPTGANKTRGRFELAFFTIGGCCMTGAAFGAMNGLRLGLKETQNMAWSKPRNVQILNMVTRQGALWANTLGSLALLYSAFGVIIEKTRGAEDDLNTVAAGTMTGMLYKCTGGLRGIARGGLTGLTLTSLYALYNNWEHMKGSLLQQSL

SEQ ID NO: 608 - protein, 77 aa, Homo sapiens
QNAGITGVSYHAHLFIYLFIYLFLRLRFKKKTKKTKPKNKKTHQLDILEAFPDSGLVSRLAFKRKSCPYRFPDLSYP

SEQ ID NO: 609 - protein, 297 aa, Homo sapiens
  SITE (39): Xaa equals any of the naturally occurring L-amino acids
PTETGHWTGSAMRLLPRLLLLLLLVFPATVLFRGGPRGXLAVAQDLTEDEETVEDSIIEDEDDEAEVEEDEPTDLVEDKEEEDVSGEPEASPSADTTILFVKGEDFPANNIVKFLVGFTNKGTEDFIVESLDASFRYPQDYQFYIQNFTALPLNTVVPPQRQATFEYSFIPAEPMGGRPFGLVINLNYKDLNGNVFQDAVFNQTVTVIEREDGLDGETIFMYMFLAGLGLLVIVGLHQLLESRKRKRPIQKVEMGTSSQNDVDMSWIPQETLNQINKASPRRLPRKRAQKRSVGSDE

SEQ ID NO: 610 - protein, 162 aa, Homo sapiens
  SITE (2): Xaa equals any of the naturally occurring L-amino acids
  SITE (91): Xaa equals any of the naturally occurring L-amino acids
RXTRPCEDGALQGVLGSVGCVGLGSHPWTFCHPELQLGRSGLAWGAPRSSKLHLSPKADVKNLMSYVVTKTKAINGKYHRFLGRHFPRFYXLYTIFMKESLEPGHASHILPASSLVETSFEDSYNCDSPTGQGFGKAGDWPADCSGSKIGLLSPWPEFYAYW

SEQ ID NO: 611 - protein, 351 aa, Homo sapiens
  SITE (307): Xaa equals any of the naturally occurring L-amino acids
  SITE (335): Xaa equals any of the naturally occurring L-amino acids
EMWLLYLLVPALFCRAGGSIPIPQKLFGEVTSPLFPKPYPNNFETTTVITVPTGYRVKLVFQQFDLEPSEGCFYDYVKISADKKSLGRFCGQLGSPLGNPPGKKEFMSQGNKMLLTFHTDFSNEENGTIMFYKGFLAYYQAVDLDECASRSKSGEEDPQPQCQHLCHNYVGGYFCSCRPGYELQEDRHSCQAECSSELYTEASGYISSLEYPRSYPPDLRCNYSIRVERGLTLHLKFLEPFDIDDHQQVHCPYDQLQIYANGKNIGEFCGKQRPPDLDTSSNAVDLLFFTDESGDSRGWKLRYTTEXHQVPPAQDPRRSSPSSRTCSLQLPSFRXLICICFTWQGKAYPVP

SEQ ID NO: 612 - protein, 449 aa, Homo sapiens
  SITE (17): Xaa equals any of the naturally occurring L-amino acids
  SITE (284): Xaa equals any of the naturally occurring L-amino acids
IYANGKNIGEFCGKQRXPDLDTSSNAVDLLFFTDESGDSRGWKLRYTTEIIKCPQPKTLDEFTIIQNLQPQYQFRDYFIATCKQGYQLIEGNQVLHSFTAVCQDDGTWHRAMPRCKIKDCGQPRNLPNGDFRYTTTMGVNTYKARIQYYCHEPYYKMQTRAGSRESEQGVYTCTAQGIWKNEQKGEKIPRCLPVCGKPVNPVEQRQRIIGGQKAKMGNFPWQVFTNIHGRGGGALLGDRWILTAAHTLYPKEHEAQSNASLDVFLGHTNVEELMKLGNHPIRRXSVHPDYRQDESYNFEGDIALLELENSVTLGPNLLPICLPDNDTFYDLGLMGYVSGFGVMEEKIAHDLRFVRLPVANPQACENWLRGKNRMDVFSQNMFCAGHPSLKQDACQGDSGGVFAVRDPNTDRWVATGIVSWGIGCSRGYGFYTKVLNYVDWIKKEMEEED

SEQ ID NO: 613 - protein, 93 aa, Homo sapiens
  SITE (61): Xaa equals any of the naturally occurring L-amino acids
  SITE (63): Xaa equals any of the naturally occurring L-amino acids
DPKYRKWAWEAVEALENHCRVNGGYSGLRDVYLLHESYDDVQQSFFLAETLKYLYLIFSDXDXLPLEHWIFNSEAHLLPILPKDKKEVEIREE

SEQ ID NO: 614 - protein, 304 aa, Homo sapiens
  SITE (208): Xaa equals any of the naturally occurring L-amino acids
  SITE (229): Xaa equals any of the naturally occurring L-amino acids
SLNPMEKTQETVQRILLEPYKYLLQLPGKQVRTKLSQAFNHWLKVPEDKLQIIIEVTEMLHNASLLIDDIEDNSKLRRGFPVAHSIYGIPSVINSANYVYFLGLEKVLTLDHPDAVKLFTRQLLELHQGQGLDIYWRDNYTCPTEEEYKAMVLQKTGGLFGLAVGLMQLFSDYKEDLKPLLNTLGLFFQIRDDYANLHSKEYSENKSXCEDLTEGKFSFPTIHAIWSRXESTQVQNILRQRTENIDIKKYCVHYLEDVGSFEYTRNTLKELEAKAYKQIDARGGNPELVALVKHLSKMFKEENE

SEQ ID NO: 615 - protein, 171 aa, Homo sapiens
  SITE (55): Xaa equals any of the naturally occurring L-amino acids
SCGPRGLASLGLGFSGRCDDQNKGRSRRARGSGGGVFRGAHLPGAAGQPEPHRAXLASRRLTRKLYKCIKKAVKQKQIRRGVKEVQKFVNKGEKGIMVLAGDTLPIEVYCHLPVMCEDRNLPYVYIPSKTDLGAAAAPKRPTCVIMVKPHEEYQEAYDECLEEVQSLPLPL

SEQ ID NO: 616 - protein, 55 aa, Homo sapiens
FNIPLHQINQVYRQGPTGIHILVSDQMVQNFQDESCFLFSTVKAESSDGIHIILK

SEQ ID NO: 617 - protein, 143 aa, Homo sapiens
GVRLREDDRRVWSTGPPRVWGADRSTLRAVMSASVVSVISRFLEEYLSSTPQRLKLLDAYLLYILLTGALQFGYCLLVGTFPFNSFLSGFISCVGSFILAVCLRIQINPQNKADFQGISPERAFADFLFASTILHLVVMNFVG

SEQ ID NO: 618 - protein, 376 aa, Homo sapiens
  SITE (21): Xaa equals any of the naturally occurring L-amino acids
AAGDRDCRPASGGNPSVIRKXYNLTSQDVGSGTSNNSQACAQFLEQYFHDSDLAQFMRLFGGNFAHQASVARVVGQQGRGRAGIEASLDVQYLMSAGANISTWVYSSPGRHEGQEPFLQWLMLLSNESALPHVHTVSYGDDEDSLSSAYIQRVNTELMKAAARGLTLLFASGDSGAGCWSVSGRHQFRPTFPASSPYVTTVGGTSFQEPFLITNEIVDYISGGGFSNVFPRPSYQEEAVTKFLSSSPHLPPSSYFNASGRAYPDVAALSDGYWVVSNRVPIPWVSGTSASTPVFGGILSLINEHRILSGRPPLGFLNPRLYQQHGAGLFDVTRGCHESCLDEEVEGQGFCSGPGWDPVTGWGTPNFPALLKTLLNP

SEQ ID NO: 619 - protein, 241 aa, Homo sapiens
  SITE (214): Xaa equals any of the naturally occurring L-amino acids
  SITE (220): Xaa equals any of the naturally occurring L-amino acids
RGGGSPGVRSADTPGHRAPGHRAAGPSPQSNADAAGNPLLLSHTLQELLARDTVQVELIPEKKGLFLKHVEYEVSSQRFKSSVYRRYNDFVVFQEMLLHKFPYRMVPALPPKRMLGADREFIEARRRALKRFVNLVARHPLFSEDVVLKLFLSFSGSDVQNKLKESAQCVGDEFLNCKLATRAKDFLPADIQAQFAISRELIRNIYNSFHKLRXRAERIXRGHRQCGRSSHIREGAKCNRV

SEQ ID NO: 620 - protein, 305 aa, Homo sapiens
  SITE (20): Xaa equals any of the naturally occurring L-amino acids
  SITE (216): Xaa equals any of the naturally occurring L-amino acids
TFNERSGRIERSNRSLPCAXLEDNLFEWHFTVRGPPDSDFDGGVYHGRIVLPPEYPMKPPSIILLTANGRFEVGKKICLSISGHHPETWQPSWSIRTALLAIIGFMPTKGEGAIGSLDYTPEERRALAKKSQDFCCEGCGSAMKDVLLPLKSGSDSSQADQEAKELARQISFKAEVNSSGKTISESDLNHSFSLTDLQDDIPTTFQGATASTSYGXQNSSAASFHQPTQPVAKNTSMSPRQRRAQQQSQRRLSTSPDVIQGHQPRDNHTDHGGSAVLIVILTLALAALIFRRIYLANEYIFDFEL

SEQ ID NO: 621 - protein, 160 aa, Homo sapiens
  SITE (13): Xaa equals any of the naturally occurring L-amino acids
DPRDSRSGLGRLXGPWQEAGSSRGPSSGDMAGVKALVALSFSGAIGLTFLMLGCALEDYGVYWPLFVLIFHAISPIPHFIAKRVTYDSDATSSACRELAYFFTTGIVVSAFGFPVILARVAVIKWGACGLVLAGNAVIFLTIQGFFLIFGRGDDFSWEQW

SEQ ID NO: 622 - protein, 126 aa, Homo sapiens
PCCLVETRTIDLNIAMVLLQSWQTAVTLPRGQRVLILCQQRCTTITMVVTYRKIRVAPASCMDRPGLLLPKDLDIHKDTGDILAHQLAEAEAEGYHTEYLFFLRHIIFIWKDFSSCNLRQQSKRLE

SEQ ID NO: 623 - protein, 108 aa, Homo sapiens
TECSGSLNHCFSFESRASCHFHVASAVSPPTPLCSPATLMAQDKAGKPSQKHLWPRKPLSPSLSHEAQPSQALMLSQWASHRAKEGLFSVPSLWVRTRGHAECPLLTW

SEQ ID NO: 624 - protein, 385 aa, Homo sapiens
LWKSRLTFKLAMSRVPSPPPPAEMSSGPVAESWCYTQIKVVKFSYMWTINNFSFCREEMGEVIKSSTFSSGANDKLKWCLRVNPKGLDEESKDYLSLYLLLVSCPKSEVRAKFKFSILNAKGEETKAMESQRAYRFVQGKDWGFKKFIRRDFLLDEANGLLPDDKLTLFCEVSVVQDSVNISGQNTMNMVKVPECRLADELGGLWENSRFTDCCLCVAGQEFQAHKAILAARSPVFSAMFEHEMEESKKNRVEINDVEPEVFKEMMCFIYTGKAPNLDKMADDLLAAADKYALERLKVMCEDALCSNLSVENAAEILILADLHSADQLKTQAVDFINYHASDVLETSGWKSMVVSHPHLVAEAYRSLASAQCPFLGPPRKRLKQS

SEQ ID NO: 625 - protein, 390 aa, Homo sapiens
  SITE (124): Xaa equals any of the naturally occurring L-amino acids
  SITE (130): Xaa equals any of the naturally occurring L-amino acids
  SITE (157): Xaa equals any of the naturally occurring L-amino acids
LERERLEQEQLERERQERERQERLERQERLERQERLERQERLDRERQERQERERLERLERERQERERQEQLEREQLEWERERRISSAAAPASVETPLNSVLGDSSASEPGLQAASQPAETPSQXGIVLGXLAPPPPPPLPPGPAQASVALPPPPEKXSTSSTPIHRASTAPPPPPLPNQVPPPPPPPPAPPLPASGFFLASMSEDNRPLTGLAAAIAGAKLRKVSRMEDTSFPSGGNAIGVNSASSKTDTGRGNGPLPLGGSGLMEEMSALLARRRRIAEKGSTIETEQKEDKGEDSEPVTSKASSTSTPEPTRKPWERTNTMNGSKSPVISRPKSTPLSQPSANGVQTEGLDYDRLKQDILDEMRKELTKLKEELIDAIRQELSKSNTA

SEQ ID NO: 626 - protein, 138 aa, Homo sapiens
SFGALVRDGNPANVSRELSLWQALPSTLCILYFLRLLPDRSEMAEVEETLKRLQSQKGVQGIIVVNTEGIPIKSTMDNPTTTQYASLMHSFILKARSTVRDIDPQNDLTFLRIRSKKNEIMVAPDKDYFLIVIQNPTE

SEQ ID NO: 627 - protein, 469 aa, Homo sapiens
  SITE (139): Xaa equals any of the naturally occurring L-amino acids
QGFGRPSVYHAAIVIFLEFFAWGLLTTPMLTVLHETFSQHTFLMNGLIQGVKGLLSFLSAPLIGALSDVWGRKPFLLGTVFFTCFPIPLMRISPWWYFAMISVSGVFSVTFSVIFAYVADVTQEHERSTAYGWVSATFXASLVSSPAIGAYLSASYGDSLVVLVATVVALLDICFILVAVPESLPEKMRPVSWGAQISWKQADPFASLKKVGKDSTVLLICITVFLSYLPEAGQYSSFFLYLRQVIGFGSVKIAAFIAMVGILSIVAQTAFLSILMRSLGNKNTVLLGLGFQMLQLAWYGFGSQAWMMWAAGTVAAMSSITFPAISALVSRNAESDQQGVAQGIITGIRGLCNGLGPALYGFIFYMFHVELTELGPKLNSNNVPLQGAVIPGPPFLFGACIVLMSFLVALFIPEYSKASGVQKHSNSSSGSLTNTPERGSDEDIEPLLQDSSIWELSSFEEPGNQCTEL

SEQ ID NO: 628 - protein, 157 aa, Homo sapiens
NYIPEVRIMSIPNLRYMKESQVLLTLTNPVENLTHVTLFECEEGDPDDINSTAKVVVPPKELVLAGKDAAAEYDELAEPQDFQDDPDIIAFRKANKVGIFIKVTPQREEGEVTVCFKMKHDFKNLAAPIRPIEESDQGTEVIWLTQHVELSLGPLLP

SEQ ID NO: 629 - protein, 208 aa, Homo sapiens
RMTSRKKVLLKVIILGDSGVGKTSLMNQYVNKKFSNQYKATIGADFLTKEVMVDDRLVTMQIWDTAGQERFQSLGVAFYRGADCCVLVFDVTAPNTFKTLDSWRDEFLIQASPRDPENFPFVVLGNKIDLENRQVATKRAQAWCYSKNNIPYFETSAKEAINVEQAFQTIARNALKQETEVELYNEFPEPIKLDKNDRAKASAESCSC

SEQ ID NO: 630 - protein, 159 aa, Homo sapiens
TAMSSEEGKLFVGGLNFNTDEQALEDHFSSFGPISEVVVVKDRETQRSRGFGFITFTNPEHASVAMRAMNGESLDGRQIRVDHAGKSARGTRGGGFGAHGRGRSYSRGGGDQGYGSGRYYDSRPGGYGYGYGRSRDYNGRNQGGYDRYSGGNYRDNYDN

SEQ ID NO: 631 - protein, 48 aa, Homo sapiens [sequence omitted]

SEQ ID NO: 632 - protein, 679 aa, Homo sapiens
RIWVNISLSGIKIIDEKTGVIEHEHPVNKISFIARDVTDNRAFGYVCGGEGQHQFFAIKTGQQAEPLVVDLKDLFQVIYNVKKKEEEKKKIEEASKAVENGSEALMILDDQTNKLKSGVDQMDLFGDMSTPPDLNSPTESKDILLVDLNSEIDTNQNSLRENPFLTNGITSCSLPRPTPQASFLPENAFSANLNFFPTPNPDPFRDDPFTQPDQSTPSSFDSLKSPDQKKENSSSSSTPLSNGPLNGDVDYFGQQFDQISNRTGKQEAQAGPWPFSSSQTQPAVRTQNGVSEREQNGFSVKSSPNPFVGSPPKGLSIQNGVKQDLESSVQSSPHDSIAIIPPPQSTKPGRGRRTAKSSANDLLASDIFAPPVSEPSGQASPTGQPTALQPNPLDLFKTSAPAPVGPLVGLGGVTVTLPQAGPWNTASLVFNQSPSMAPGAMMGGQPSGFSQPVIFGTSPAVSGWNQPSPFAASTPPPVPVVWGPSASVAPNAWSTTSPLGNPFQSNIFPAPAVSTQPPSMHSSLLVTPPQPPPRAGPPKDISSDAFTALDPLGDKEIKDVKEMFKDFQLRQPPAVPARKGEQTSSGTLSAFASYFNSKVGIPQENADHDDFDANQLLNKINEPPKPAPRQVSLPVTKSTDNAFENPFFKDSFGSSQASVASSQPVSSEMYRDPFGNPFA

SEQ ID NO: 633 - protein, 169 aa, Homo sapiens
  SITE (1): Xaa equals any of the naturally occurring L-amino acids
  SITE (9): Xaa equals any of the naturally occurring L-amino acids
  SITE (150): Xaa equals any of the naturally occurring L-amino acids
  SITE (159): Xaa equals any of the naturally occurring L-amino acids
XLVDPPGLXGIPRAALGHLAGEAAAAPGPGTPCASRGARLPGPVSSARNPSTVCLCPEQPTCSNADSRAHPLGDEGGTASKKQKNKKKTRNRASVANGGEKASEKLAPEEVPLSAEAQAQQLAQELAWCVEQLELGLKRQKPTPKQKEQXLEQSEPCAXKERPCPGRGS

SEQ ID NO: 634 - protein, 389 aa, Homo sapiens
  SITE (1): Xaa equals any of the naturally occurring L-amino acids
  SITE (152): Xaa equals any of the naturally occurring L-amino acids
  SITE (160): Xaa equals any of the naturally occurring L-amino acids
  SITE (175): Xaa equals any of the naturally occurring L-amino acids
XGLCAPQPGVRKARGAGNWRVGLQTGEAAPSPHRDLRDTPDPRPWLARTHRMTTTLVSATIFDLSEVLCKGNKMLNYSAPSAGGCLLDRKAVGTPAGGGFPRRHSVTLPSSKFHQNQLLSSLKGEPAPALSSRDSRFRDRSFSEGASGCCPXRSSPGAAXSNSSRYKTELCRPFXENGACKYGDKCQFAHGIHELRSLTRHPKYKTELCRTFHTIGFCPYGPRCHFIHNAEERRALAGARDLSADRPRLQHSFSFAGFPSAAATAAATGLLDSPTSITPPPILSADDLLGSPTLPDGTNNPFAFSSQELASLFAPSMGLPGGGSPTTFLFRPMSESPHMFDSPPSPQDSLSDQEGYLSSSSSSHSGSDSPTLDNSRRLPIFSRLSISDD

SEQ ID NO: 635 - protein, 340 aa, Homo sapiens
  SITE (101): Xaa equals any of the naturally occurring L-amino acids
STHASGSLYNTFVIEEKHGFNQQTLGFFMKDAVKKFIVTQCILLPVSSLLLYIIKIGGDYFFIYAWLFTLVVSLVLVTIYADYIAPLFDKFTPLPEGKLKXEIEVMAKSIDFPLTKVYVVEGSKRSSHSNAYFYGFFKNKRIVLFDTLLEEYSVLNKDIQEDSGMEPRNEEEGNSEEIKAKVKNKKQGCKNEEVLAVLGHELGHWKLGHTVKNIIISQMNSFLCFFLFAVLIGRKELFAAFGFYDSQPTLIGLLIIFQFIFSPYNEVLSFCLTVLSRRFEFQADAFAKKLGKAKDLYSALIKLNKDNLGFPVSDWLFSMWHYSHPPLLERLQALKTMKQH

SEQ ID NO: 636 - protein, 200 aa, Homo sapiens
  SITE (10): Xaa equals any of the naturally occurring L-amino acids
  SITE (11): Xaa equals any of the naturally occurring L-amino acids
ASIGRTGGSXXSCSGGRLLGVEFPSAPRVRPFERSAPAPATSLLGAMTTTTTFKGVDPNSRNSSRVLRPPGGGSNFSLGFDEPTEQPVRKNKMASNIFGTPEENQASWAKSAGAKSSGGREDLESSGLQRRNSSEASSGDFLDLKGEGDIHENVDTDLPGSLGQSEEKPVPAAPVPSPVAPAPVPSRRNPPGGKSSLVLG

SEQ ID NO: 637 - protein, 54 aa, Homo sapiens [sequence omitted]

SEQ ID NO: 638 - protein, 207 aa, Homo sapiens
AAPRRHRGAVESPPPDPRPVARPHLANRGGPRSVRTTPPLLSPPPDHAPQLRKMGNCLKSPTSDDISLLHESQSDRASFGEGTEPDQEPPPPYQEQVPVPVYHPTPSQTRLATQLTEEEQIRIAQRIGLIQHLPKGVYDPGRDGSEKKIRECVICMMDFVYGDPIRFLPCMHIYHLDCIDDWLMRSFTCPSCMEPVDAALLSSYETN

SEQ ID NO: 639 - protein, 142 aa, Homo sapiens
GQVQGNSSIKLELDASKKKESKDHQLLRYLLDKDEKDLRSTPNLSLDDVKVKVEKKEQMDPCNTNPTPMTKPTPEEIKLEAQSQFTADLDQFDQLLPTLEKAAQLPGLCETDRMDGAVTSVTIKSEILPASLQSALPDPLPG

SEQ ID NO: 640 - protein, 106 aa, Homo sapiens
DNRRTFLPRLFVGVVPGTGFGELVYNQGLILKMSFFILLFFKHQILLFFFFLPSPQIPSQIILLTTIPTGRGELKHLLPLPCFSFIFYFFASVLMFLHTLHLYSKV

SEQ ID NO: 641 - protein, 645 aa, Homo sapiens
  SITE (3): Xaa equals any of the naturally occurring L-amino acids
  SITE (65): Xaa equals any of the naturally occurring L-amino acids
CAXRERLKNPNAPMLPPPKNKEDFEKTLSQAIVKVVIPTERNLLALIHRMIEFVVREGPMFEAMXMNREINNPMFRFLFENQTPAHVYYRWKLYSILQGDSPTKWRTEDFRMFKNGSFWRPPPLNPYLHGMSEEQETEAFVEEPSKKGALKEEQRDKLEEILRGLTPRKNDIGDAMVFCLNNAEAAEEIVDCITESLSILKTPLPKKIARLYLVSDVLYNSSAKVANASYYRKFFETKLCQIFSDLNATYRTIQGHLQSENFKQRVMTCFRAWEDWAIYPEPFLIKLQNIFLGLVNIIEEKETEDVPDDLDGAPIEEELDGAPLEDVDGIPIDATPIDDLDGVPIKSLDDDLDGVPLDATEDSKKNEPIFKVAPSKWEAVDESELEAQAVTTSKWELFDQHEESEEEENQNQEEESEDEEDTQSSKSEEHHLYSNPIKEEMTESKFSKYSEMSEEKRAKLREIELKVMKFQDELESGKRPKKPGQSFQEQVEHYRDKLLQREKEKELERERERDKKDKEKLESRSKDKKEKDECTPTRKERKRRHSTSPSPSRSSSGRRVKSPSPKSERSERSERSHKESSRSRSSHKDSPRDVSKKAKRSPSGSRTPKRSRRSRSRSPKKSGKKSRSQSRSPHRSHKKSKKNKH

SEQ ID NO: 642 - protein, 147 aa, Homo sapiens
  SITE (2): Xaa equals any of the naturally occurring L-amino acids
  SITE (103): Xaa equals any of the naturally occurring L-amino acids
WXGVIGTGRYRVCEVDPELTEKLRKFRFRKETDNAAIIMKVDKDRQMVVLEEEFQNISPEELKMELPERQPRFVVYSYKYVHDDGRVSYPLCFIFSSPVGCKXEQQMMYAGSKNRLVQTAELTKVFEIRTTDDLTEAWLQEKLSFFR

SEQ ID NO: 643 - protein, 79 aa, Homo sapiens
KNTISNNSDMAEVKSMFREVLPKQGPLFVEDIMTMVLCKPKLLPLKSLTLEKLEKMHQAAQNTIRQQEMAEKDQRQITH

SEQ ID NO: 644 - protein, 273 aa, Homo sapiens
  SITE (1): Xaa equals any of the naturally occurring L-amino acids
XAGPRSIRCPLIFLPPVSGTADVFFRQILALTGWGYRVIALQYPVYWDHLEFCDGFRKLLDHLQLDKVHLFGASLGGFLAQKFAEYTHKSPRVHSLILCNSFSDTSIFNQTWTANSFWLMPAFMLKKIVLGNFSSGPVDPMMADAIDFMVDRLESLGQSELASRLTLNCQNSYVEPHKIRDIPVTIMDVFDQSALSTEAKEEMYKLYPNARRAHLKTGGNFPYLCRSAEVNLYVQIHLLQFHGTKYAAIDPSMVSAEELEVQKGSLGISQEEQ

SEQ ID NO: 645 - protein, 88 aa, Homo sapiens
FANSYLLNGEVLKISPGKFKIQTPSIEHLHCVPGSKIGAFIHIVSIPVRSELSLHLKLEETCSECKKLPCLRSPRKEPSEPATESWSL

SEQ ID NO: 646 - protein, 100 aa, Homo sapiens
FYNEMLLSIGMLMLSATQVYTILTVQLFAFLNLLPVEADILAYNFENASQTFDDLPARFGYRLPAEGLKGFLINSKPENACEPIVPPPVKRQFIWALSSC

SEQ ID NO: 647 - protein, 190 aa, Homo sapiens
  SITE (130): Xaa equals any of the naturally occurring L-amino acids
MLDISGFQGGPVEILPFLYLGSAYHASRKDMLDALGITALINVSANCPNHFEGHYQYKSIPVEDNHKADISSWFNEAIDFIDSIKNAGGRVFVHCQAGISRSATICLAYLMRTNRVKLDEAFEFVKQRRXSSLPTSASWASCCSLSPRCWLRTVRQRLGAPPWLCSTEAPPPPPCSTSPSPSLSTPRTVR

SEQ ID NO: 648 - protein, 340 aa, Homo sapiens
  SITE (134): Xaa equals any of the naturally occurring L-amino acids
SQDQGERGGAGAARQFLLVNFNHIHKRIRRVADKYLSGLVDKFPHLLWSGTVLKTMLDILQTLSLSLSADIHKDQPYYDIPDAPYRITVPDTYEARESIVKDFAARCGMILQEAMKWAPTVTKSHLQEYLNKHXNWVSGLSQHTGLAMATESILHFAGYNKQNTTLGATQLSERPACVKKDYSNFMASLNLRNRYAGEVYGMIRFSGTTGQMSDLNKMMVQDLHSALDRSHPQHYTQAMFKLTAMLISSKDCDPQLLHHLCWGPLRMFNEHGMETALACWEWLLAGKDGVEVPFLVTWHTIDADAQSSAMCCAGRPRTHPQASPTSPACTRRTLSRRSTG

SEQ ID NO: 649 - protein, 214 aa, Homo sapiens
AVRRGAGCPAPGVRARGAMAHVGSRKRSRSRSRSRGRGSEKRKKKSRKDTSRNCSASTSQGRKASTAPGAEERSKQKARRRTRSSSSSSSSSSSSSSSSSSSSSSSSSDGRKKRGKYKDKRRKKKKKRKKLKKKGKEKAEAQQVEALPGPSLDQWHRSAGEEEDGPVLTDEQKSRIQAMKPMTKEEWDARQSIIRKWWTLRRGAPGLLREMARS

SEQ ID NO: 650 - protein, 401 aa, Homo sapiens
  SITE (375): Xaa equals any of the naturally occurring L-amino acids
  SITE (396): Xaa equals any of the naturally occurring L-amino acids
GRVGQKSQKPRDSSVEVRSDWEVKEEMDFPQLMKMRYLEVSEPQDIECCGALEYYDKAFDRITTRSEKPLRSIKRIFHTVTTTDDPVIRKLAKTQGNVFATDAILATLMSCTRSVYSWDIVVQRVGSKLFFDKRDNSDFDLLTVSETANEPPQDEGNSFNSPRNLAMEATYINHNFSQQCLRMGKERYNFPNPNPFVEDDMDKNEIASVAYRYRSGKLGDDIDLIVRCEHDGVMTGANGEVSFINIKTLNEWDSRHCNGVDWRQKLDSQRGAVIATELKNNSYKLARWTCCALLAGSEYLKLGYVSRYHVKDSSRHVILGTQQFKPNEFASQINLSVENAWGILRCVIDICMKLEEGKYLILKDPNKQVIRVYSXPDGTFSSDEDEEEEEEEEEEXEEEET

SEQ ID NO: 651 - protein, 58 aa, Homo sapiens
  SITE (20): Xaa equals any of the naturally occurring L-amino acids
  SITE (38): Xaa equals any of the naturally occurring L-amino acids
TELHTGRETKNITSILVSWXLFFLRESHSVAGLEYSGXGSRAHCNPLASRGSSQSPAF

SEQ ID NO: 652 - protein, 211 aa, Homo sapiens
STSWFSLWMERAWASLGEGEARGAGLEWETCWPVGLTCPSVLSPHILLPSSSHTHTFQGWGEPDCQDPRSGAPYIPQSGIHFLVPGMAMGTLPLCRDQWDGLYLSFSKRGLCPPGVSLPTSLLRGNNRRMGFLLWGEFIPSPRVPSHTVILPSCPRRPAAGKELPRKHSLGQVLAFLNFRDSYRKEGNKEFSSAAPFPTPTPSLQGPLPAS

SEQ ID NO: 653 - protein, 286 aa, Homo sapiens
SRRPPAACSRLLREPSRPGAPHRRGTGRSCSGTRGRWDTGGLDTSLGRNRLRFSPEGKRAPGAGPGGSIRIYSMRFCPFAERTRLVLKAKGIRHEVININLKNKPEWFFKKNPFGLVPVLENSQGQLIYESAITCEYLDEAYPGKKLLPDDPYEKACQKMILELFSKVPSLVGSFIRSQNKEDYAGLKEEFRKEFTKLEEVLTNKKTTFFGGNSISMIDYLIWPWFERLEAMKLNECVDHTPKLKLWMAAMKEDPTVSALLTSEKDWQGFLELYLQNSPEACDYGL

SEQ ID NO: 654 - protein, 92 aa, Homo sapiens
SQARGQGQGGRSWGAGALGQSGPPPAACPVGLWKGALGSRCWEPELGRAWAGGVPPSHKGWAETQLSAAWRFPFWGGLRSCHLVLCPHRNQR

SEQ ID NO: 655 - protein, 281 aa, Homo sapiens
PPLAPTATAGTLAASEGRWKSMRKSPLGGGGGSGASSQAACLKQILLLQLDLIEQQQQQLQAKEKEIEELKSERDTLLARIERMERRMQLVKKDNEKERHKLFQGYETEEREETELSEKIKLECQPELSETSQTLPPKPFSCGRSGKGHKRKSPFGSTERKTPVKKLAPEFSKVKTKTPKHSPIKEEPCGSLSETVCKRELRSQETPEKPRSSVDTPPRLSTPQKGPSTHPKEKAFSSEIEDLPYLSTTEMYLCRWHQPPPSPLPLRESSPKKEETVASKA

SEQ ID NO: 656 - protein, 258 aa, Homo sapiens
  SITE (185): Xaa equals any of the naturally occurring L-amino acids
EKKLSCLQAAVTASRTLSALLPTCTPGLSIPVPPDKRGQVSQELPPPCSTAKKTPFHDFPPRPRSYLPTPLSESPGTHRGAHHIPLSTLPASPTCHPLPCPSPTPQLQEWKKSPRSSGSPSPHPELRLGYLLQHPCQDFSTLLHTSRDRELTTSQGSLLPLDCSDFSISLIHRRGFCFSVALSMXSHLPTLLPGVLRSHIDSPEPSSLQAKESRRHRGHFCCNKVSCLFTVRTFLSIPSRLGQGDSQMHTHKYSVLKL

SEQ ID NO: 657 - protein, 485 aa, Homo sapiens
  SITE (145): Xaa equals any of the naturally occurring L-amino acids
SLAMASFSAETNSTDLLSQPWNEPPVILSMVILSLTFLLGLPGNGLVLWVAGLKMQRTVNTIWFLHLTLADLLCCLSLPFSLAHLALQGQWPYGRFLCKLIPSIIVLNMFASVFLLTAISLDRCLVVFKPIWCQNHRNVGMACSXCGCIWVVACVMCIPVFVYREIFTTDNHNRCGYKFGLSSSLDYPDFYGDPLENRSLENIVQPPGEMNDRLDPSSFQTNDHPWTVPTVFQPQTFQRPSADSLPRGSARLTSQNLYSNVFKPADVVSPKIPSGFPIEDHETSPLDNSDAFLSTHLKLFPSASSNSFYESELPQGFQDYYNLGQFTDDDQVPTPLVAITITRLVVGFLLPSVIMIACYSFIVFRMQRGRFAKSQSKTFRVAVVVVAVFLVCWTPYHIFGVLSLLTDPETPLGKTLMSWDHVCIALASANSCFNPFLYALLGKDFRKKARQSIQGILEAAFSEELTRSTHCPSNNVISERNSTTV

SEQ ID NO: 658 - protein, 59 aa, Homo sapiens
QRYVINPNAQPNCYVIPIPILCNICSFLERGYVSRAQWLTPVIPALWEAEAGGLPEVRS

SEQ ID NO: 659 - protein, 333 aa, Homo sapiens
  SITE (186): Xaa equals any of the naturally occurring L-amino acids
  SITE (260): Xaa equals any of the naturally occurring L-amino acids
STERDFFMRMKCTVTNRGRTVNLKSATWKVLHCTGQVKVYNNCPPHNSLCGYKEPLLSCLIIMCEPIQHPSHMDIPLDSKTFLSRHSMDMKFTYCDDRITELIGYHPEELLGRSAYEFYHALDSENMTKSHQNLCTKGQVVSGQYRMLAKHGGYVWLETQGTVIYNPRNLQPQCIMCVNYVLSEIXKNDVVFSMDQTESLFKPHLMAMNSIFDSSGKGAVSEKSNFLFTKLKEEPEELAQLAPTPGDAIISLDFGNQNFXESSAYGKAILPPSQPWATELRSHSTQSELGACLPSPCPRQLPRAAPPPVPPAAAAAAPRPIALKTITHLWITT

SEQ ID NO: 660 - protein, 185 aa, Homo sapiens
QAEAEHRHRPDRRACCHLPGRAVTGMDPVARRLLWDTVARARESGKAIIITSHSMEECEALCTRLAIMVQGQFKCLGSPQHLKSKFGSGYSLRAKVQSEGQQEALEEFKAFVDLTFPGSVLEDEHQGMVHYHLPGRDLSWAKVFGILEKAKEKYGVDDYSVSQISLEQVFLSFAHLQPPTAEEGR

SEQ ID NO: 661 - protein, 390 aa, Homo sapiens
GRAPKEAEGAEDRQPASRRGAGTTAAMAASGPGCRSWCLCPEVPSATFFTALLSLLVSGPRLFLLQQPLAPSGLTLKSEALRNWQVYRLVTYIFVYENPISLLCGAIIIWRFAGNFERTVGTVRHCFFTVIFAIFSAIIFLSFEAVSSLSKLGEVEDARGFTPVAFAMLGVTTVRSRMRRALVFGMVVPSVLVPWLLLGASWLIPQTSFLSNVCGLSIGLAYGCTYCYSIDLSERVALKLDQTFPFSLMRRISVFKYVSGSSAERRAAQSRKLNPVPGSYPTQSCHPHLSPSHPVSQTQHASGQKLASWPSCTPGHMPTLPPYQPASGLCYVQNHFGPNPTSSSVYPASAGTSLGIQPPTPVNSPGTVYSGALGTPGAAGSKESSRVPMP

SEQ ID NO: 662 - protein, 248 aa, Homo sapiens
ELYCGVLPRSPWFLSERRRQMADFDTYDDRAYSSFGGGRGSRGSAGGHGSRSQKELPTEPPYTAYVGNLPFNTVQGDIDAIFKDLSIRSVRLVRDKDTDKFKGFCYVEFDEVDSLKEALTYDGALLGDRSLRVDIAEGRKQDKGGFGFRKGGPDDRGFRDDFLGGRGGSRPGDRRTGPPMGSRFRDGPPLRGSNMDFREPTEEERAQRPRLQLKPRTVATPLNQVANPNSAIFGGARPREEVVQKEQE

SEQ ID NO: 663 - protein, 616 aa, Homo sapiens
KEEEIVDWWSKFYASSGEHEKCGQYIQKGYSKLKIYNCELENVAEFEGLTDFSDTFKLYRGKSDENEDPSVVGEFKGSFRIYPLPDDPSVPAPPRQFRELPDSVPQECTVRIYIVRGLELQPQDNNGLCDPYIKITLGKKVIEDRDHYIPNTLNPVFGRMYELSCYLPQEKDLKISVYDYDTFTRDEKVGETIIDLENRFLSRFGSHCGIPEEYCVSGVNTWRDQLRPTQLLQNVARFKGFPQPILSEDGSRIRYGGRDYSLDEFEANKILHQHLGAPEERLALHILRTQGLVPEHVETRTLHSTFQPNISQGKLQMWVDVFPKSLGPPGPPFNITPRKAKKYYLRVIIWNTKDVILDEKSITGEEMSDIYVKGWIPGNEENKQKTDVHYRSLDGEGNFNWRFVFPFDYLPAEQLCIVAKKEHFWSIDQTEFRIPPRLIIQIWDNDKFSLDDYLGFLELDLRHTIIPAKSPEKCRLDMIPDLKAMNPLKAKTASLFEQKSMKGWWPCYAEKDGARVMAGKVEMTLEILNEKEADERPAGKGRDEPNMNPKLDLPNRPETSFLWFTNPCKTMKFIVWRRFKWVIIGLLFLLILLLFVAVLLYSLPNYLSMKIVKPNV

SEQ ID NO: 664 - protein, 136 aa, Homo sapiens
ARLFSGASMSMADRHGQGAVFTIGLMCSQLFSCWFHLNNQMLVLRPSMIDIIIHFDPSCPSLSLSSPLCGFFLETERNPRCWHQAYSVWPFGWTCYLKPSAQNILESPHFSGLLKLYLCIIARVVHRQRRIRLFSF

SEQ ID NO: 665 - protein, 78 aa, Homo sapiens
VCPHPAMARLLQASCLLSLLLAGFVSQSRGQEKSKMDCHGGISGTIYEYGALTIDGEEYIPFKQYAGKYVLFVNVASY

SEQ ID NO: 666 - protein, 313 aa, Homo sapiens
  SITE (23): Xaa equals any of the naturally occurring L-amino acids
AAMSNPSAPPPYEDRNPLYPGPXPPGGYGQPSVLPGGYPAYPGYPQPGYGHPAGYPQPMPPTHPMPMNYGPGHGYDGEERAVSDSFGPGEWDDRKVRHTFIRKVYSIISVQLLITVAIIAIFTFVEPVSAFVRRNVAVYYVSYAVFVVTYLILACCQGPRRRFPWNIILLTLFTFAMGFMTGTISSMYQTKAVIIAMIITAVVSISVTIFCFQTKVDFTSCTGLFCVLGIVLLVTGIVTSIVLYFQYVYWLHMLYAALGAICFTLFLAYDTQLVLGNRKHTISPEDYITGALQIYTDIIYIFTFVLQLMGDRN

SEQ ID NO: 667 - protein, 487 aa, Homo sapiens
PRGCWSSCLDAMFRLNSLSALAELAVGSRWYHGGSQPIQIRRRLMMVAFLGASAVTASTGLLWKRAHAESPPCVDNLKSDIGDKGKNKDEGDVCNHEKKTADLAPHPEEKKKKRSGFRDRKVMEYENRIRAYSTPDKIFRYFATLKVISEPGEAEVFMTPEDFVRSITPNEKQPEHLGLDQYIIKRFDGKKISQEREKFADEGSIFYTLGECGLISFSDYIFLTTVLSTPQRNFEIAFKMFDLNGDGEVDMEEFEQVQSIIRSQTSMGMRHRDRPTTGNTLKSGLCSALTTYFFGADLKGKLTIKNFLEFQRKLQHDVLKLEFERHDPVDGRITERQFGGMLLAYSGVQSKKLTAMQRQLKKHFKEGKGLTFQEVENFFTFLKNINDVDTALSFYHMAGASLDKVTMQQVARTVAKVELSDHVCDVVFALFDCDGNGELSNKEFVSIMKQRLMRGLEKPKDMGFTRLMQAMWKCAQETAWDFALPKQ

SEQ ID NO: 668 - protein, 106 aa, Homo sapiens
GGVGAEPDWSGQRHAGAVPRASPAVAVAVAGPWGEDGFLRGRGVRQPAAQPLSSPQDDHGRAARHLRQHAGRVALLACRSLSLRGRQQSQEAGMKVALSPPQGSRT

SEQ ID NO: 669 - protein, 105 aa, Homo sapiens
FGTSRRETSVVPCRVASVLRRPSPSFAIARHRTPSLEICRHLDFSHAVCQVSAATRRQGAGPCGLCCTSDGFAPASALSLLQHSDLHPLRGFHCPRGENAPGSVT

SEQ ID NO: 670 - protein, 285 aa, Homo sapiens
TGWSHRGKKMSPRTPGFTPSPQRCLHHRCSTPAAAAASAECGPSGATLIRIPLHRVQPGRRILNLLRGWREPAELPKLGAPSPEDKPIFVPLSNYKGWLHHRFDPKASTPSSQWDQFAIQYGTGRVHGILSEDKLTIGGIKGASVIFGEALWEPSLVFAFAHFDGILGLGFPILSVEGVRPPMDVLVEQGLLDKPVFSFYLNRDPEEPDGGELVLGGSDPAHYIPPLTFVPVTVPAYWQIHMERVKVGPGLTLCAKGCAAILDTGTSLITGPTEEIRALHAAIGG

SEQ ID NO: 671 - protein, 157 aa, Homo sapiens
YEEQAFQDLSGGDPPGGSTSHLMWKRMKNLRGGSCPLMPDKPLSANVPNDKFTQNPMRGLGHPLRHLPLPQPPSAISPGENSKSRFPPQCYATQYQDYSLSSAHKVSGMASRLLGPSFESYLLPELTRYDCEVNVPVLGSSTLLQGGDLLRALDQAT

SEQ ID NO: 672 - protein, 307 aa, Homo sapiens
HYVGGAVRRGRGGGSGNGGGRRLGGRAGGSHGGGDTGGSGGGGKRSRDRGRNRVWRHRRGSAESEGAKIDASKNEEDEGHSNSSPRHSEAATAQREEWKMFIGGLSWDTTKKDLKDYFSKFGEVVDCTLKLDPITGRSRGFGFVLFKESESVDKVMDQKEHKLNGKVIDPKRAKAMKTKEPVKKIFVGGLSPDTPEEKIREYFGGFGEVESIELPMDNKTNKRRGFCFITFKEEEPVKKIMEKKYHNVGLSKCEIKVAMSKEQYQQQQQWGSRGGFAGRARGRGGDQQSGYGKVSRRGGHQNSYKPY

SEQ ID NO: 673 - protein, 248 aa, Homo sapiens
  SITE (4): Xaa equals any of the naturally occurring L-amino acids
PLRXVLVESIPEGLDFPNASTGNPSTSQAWLGLLAGAHSSLDIASFYWTLTNNDTHTQEPSAQQGEEVLRQLQTLAPKGVNVRIAVSKPSGPQPQADLQALLQSGAQVRMVDMQKLTHGVLHTKFWVVDQTHFYLGSANMDWRSLTQVKELGVVMYNCSCLARDLTKIFEAYWFLGQAGSSIPSTWPRFYDTRYNQETPMEICLNGTPALAYLASAPPPLCPSGRTPDLKALLNVVGQCPEFHLRRCS

SEQ ID NO: 674 - protein, 303 aa, Homo sapiens
  SITE (89): Xaa equals any of the naturally occurring L-amino acids
  SITE (144): Xaa equals any of the naturally occurring L-amino acids
  SITE (290): Xaa equals any of the naturally occurring L-amino acids
  SITE (291): Xaa equals any of the naturally occurring L-amino acids
  SITE (302): Xaa equals any of the naturally occurring L-amino acids
ALDFGDSCQWPRPQDTMKQLPVLEPGDKPRKATWYTLTVPGDSPCARVGHSCSYLPPVGNAKRGKVFIVGGANPNRSFSDVHTMDLGKXQWDLDTCKGLLPRYEHASFIPSCTPDRIWVFGGANQSGNRNCLQVLNPETRTWTXPEVTSPPPSPRTFHTSSAAIGNQLYVFGGGERGAQPVQDTKLHVFDANTLTWSQPETLGNPPSPRHGHVMVAAGTKLFIHGGLAGDRFYDDLHCIDISGHEMAGSLNPTGGLLPAGCAAHSAVAMGKHVYIFGGIDSCRALDTCYXXHTEEQHWTLLXI

SEQ ID NO: 675 - protein, 361 aa, Homo sapiens
LDKKKSNQMCKNSQDIICSNAGTCHCGRCKCDNSDGSGLVYGKFCECDDRECIDDETEEICGGHGKCYCGNCYCKAGWHGDKCEFQCDITPWESKRRCTSPDGKICSNRGTCVCGECTCHDVDPTGDWGDIHGDTCECDERDCRAVYDRYSDDFCSGHGQCNCGRCDCKAGWYGKKCEHPQSCTLSAEESIRKCQGSSDLPCSGRGKCECGKCTCYPPGDRRVYGKTCECDDRRCEDLDGVVCGGHGTCSCGRCVCERGWFGKLCQHPRKCNMTEEQSKNLCESADGILCSGKGSCHCGKCICSAEEWYISGEFCDCDDRDCDKHDGLICTGNGICSCGNCECWDGWNGNACEIWLGSEYP

SEQ ID NO: 676 - protein, 154 aa, Homo sapiens
GRSLRNTLPACAKRKQAPCFKKTRLTLVCESAPGPITMDLTGDLEALKKETIVLKEGSEYRVKIHFKVNRDIVSGLKYVQHTYRTGVKVDKATFMVGSYGPRPEEYEFLTPVEEAPKGMLARGTYHNKSFFTDDDKQDHLSWEWNLSIKKEWTE

SEQ ID NO: 677 - protein, 270 aa, Homo sapiens
EEAATPSGGGRNRSASSSWVGTMAGITTIEAVKRKIQVLQQQADDAEERAERLQREVEGERRAREQAEAEVASLNRRIQLVEEELDRAQERLATALQKLEEAEKAADESERGMKVIENRALKDEEKMELQEIQLKEAKHIAEEADRKYEEVARKLVIIEGDLERTEERAELAESRCREMDEQIRLMDQNLKCLSAAEEKYSQKEDKYEEEIKILTDKLKEAETRAEFAERSVAKLEKTIDDLEDKLKCTKEEHLCTQRMLDQTLLDLNEM

SEQ ID NO: 678 - protein, 712 aa, Homo sapiens
  SITE (1): Xaa equals any of the naturally occurring L-amino acids
  SITE (2): Xaa equals any of the naturally occurring L-amino acids
  SITE (21): Xaa equals any of the naturally occurring L-amino acids
  SITE (29): Xaa equals any of the naturally occurring L-amino acids
  SITE (45): Xaa equals any of the naturally occurring L-amino acids
  SITE (389): Xaa equals any of the naturally occurring L-amino acids
  SITE (394): Xaa equals any of the naturally occurring L-amino acids
XXPLTRLNLPACRMGADWTTXSLRALAAXAPALERESEGTTGVLXWVLTPALLHERLSSGCVQGITELFCPNPEAYQGLPTLPPSTLSVAAAAAMAGMKTASGDYIDSSWELRVFVGEEDPEAESVTLRVTGESHIGGVLLKIVEQINRKQDWSDHAIWWEQKRQWLLQTHWTLDKYGILADARLFFGPQHRPVILRLPNRRALRLRASFSQPLFQAVAAICRLLSIRHPEELSLLRAPEKKEKKKKEKEPEEELYDLSKVVLAGGVAPALFRGMPAHFSDSAQTEACYHMLSRPQPPPDPLLLQRLPRPSSLSDKTQLHSRWLDSSRCLMQQGIKAGDALWLRFKYYSFFDLDPKTDPVRLTQLYEQARWDLLLEEIDCTEEEMMVFXALQDXLTTIPELKDHLRIFRPRKLTLKGYRQHWVVFKETTLSYYKSQDEAPGDPIQQLNLKGCEVVPDVNVSGQKFCIKLLVPSPEGMSEIYLRCQDEQQYARWMAGCRLASKGRTMADSSYTSEVQAILAFLSLQRTGSGGPGNHPHGPDASAEGLNPYGLVAPRFQRKFKAKQLTPRILEAHQNVAQLSLAEAQLRFIQAWQSLPDFGISYVMVRFKGSRKDEILGIANNRLIRIDLAVGDVVKTWRFSNMRQWNVNWDIRQVAIEFDEHINVAFSCVSASCRIVHEYIGGYIFLSTRERARGEELDEDLFLQLTGGHEAF

SEQ ID NO: 679 - protein, 179 aa, Homo sapiens
  SITE (179): Xaa equals any of the naturally occurring L-amino acids
TVKVWATHRQKFLFSLSQHINWVRCAKFSPDGRLIVSASDDKTVKLWDKSSRECVHSYCEHGGFVTYVDFHPSGTCIAAAGMDNTVKVWDVRTHRLLQHYQLHSAAVNGLSFHPSGNYLITASSDSTLKILDLMEGPAALHTPRGIRDQPHWPSSMGNLPEVDFPVPPRQKQGVLESVX

SEQ ID NO: 680 - protein, 271 aa, Homo sapiens
  SITE (9): Xaa equals any of the naturally occurring L-amino acids
  SITE (10): Xaa equals any of the naturally occurring L-amino acids
  SITE (11): Xaa equals any of the naturally occurring L-amino acids
  SITE (13): Xaa equals any of the naturally occurring L-amino acids
  SITE (17): Xaa equals any of the naturally occurring L-amino acids
  SITE (28): Xaa equals any of the naturally occurring L-amino acids
  SITE (29): Xaa equals any of the naturally occurring L-amino acids
LARTPLPSXXXFXNWPXPALCSCGLIRXXPARHPRPAMAIYKQSQHMTEVVRRCPHHERCSDSDGLAPPQHLIRVEGNLRVEYLDDRNTFRHSVVVPYEPPEVGSDCTTIHYNYMCNSSCMGGMNRRPILTIITLEDSSGNLLGRNSFEVRVCACPGRDRRTEEENLRKKGEPHHELPPGSTKRALPNNTSSSPQPKKKPLDGEYFTLQIRGRERFEMFRELNEALELKDAQAGKEPGGSRAHSSHLKSKKGQSTSRHKKLMFKTEGPDSD

SEQ ID NO: 681 - protein, 39 aa, Homo sapiens
GQVRCLTSVIPTLWEAEMGGLLEPRSSRPAWATQRDPIS

SEQ ID NO: 682 - protein, 84 aa, Homo sapiens
PPFYLRSIFIHCIGNCFMLLQSAKSRAFIRPCHTQESTYLKKKQFPELSTPSCRFGVFLVLTLKSHVLIFFLPVFVCKMSSICY

SEQ ID NO: 683 - protein, 59 aa, Homo sapiens
AFVVFSFNTCTSLLFEKCYSCQRIFMDLKIISCEVECKCTVIHSVYIKIPGIFTFATLI

SEQ ID NO: 684 - protein, 301 aa, Homo sapiens
  SITE (265): Xaa equals any of the naturally occurring L-amino acids
RNSRVDPRVRGSQQLPLLCPAPGTRLFPLQCLRGGDGSTMDPRLSTVRQTCCCFNVRIATTALAIYHVIMSVLLFIEHSVEVAHGKASCKLSQMGYLRIADLISSFLLITMLFIISLSLLIGVVKNREKYLLPFLSLQIMDYLLCLLTLLGSYIELPAYLKLASRSRASSSKFPLMTLQLLDFCLSILTLCSSYMEVPTYLNFKSMNHMNYLPSQEDMPHNQFIKMMIIFSIAFITVLIFKVYMFKCVWRCYRLIKCMNSVEEKXNSKMLQKVVLPSYEEALSLPSKTPEGGPAPPPYSEV

SEQ ID NO: 685 - protein, 103 aa, Homo sapiens
  SITE (83): Xaa equals any of the naturally occurring L-amino acids
  SITE (94): Xaa equals any of the naturally occurring L-amino acids
EQCWWGQSLQRLGWQPTNTSGTTRRCAGPSNSMQLASRSAGELVESLKLMSLCLGSQLHGSTKYIIDPQNGLSFSSVKVQEKXTWKMCISSTGXAGQVPQWAA

SEQ ID NO: 686 - protein, 245 aa, Homo sapiens
  SITE (145): Xaa equals any of the naturally occurring L-amino acids
ARAWKHIDYFNNQIIVDLVEQQHKGIIAILDDACMNVGKVTDEMFLEALNSKLGKHAHFSSRKLCASDKILEFDRNFRIRHYAGDVVYSVIGFIDKNKDTLFQDFKRLMYNSSNPVLKNMWPEGKLSITEVTKRPLTAATLFKNXMIALVDNLASKEPYYVRCIKPNDKKSPQIFDDERCRHQVEYLGLLENVRVRRAGFAFRQTYEKFLHRYKMISGIAPGPTMDLPFRQRGCQETNLNGVVFR

SEQ ID NO: 687 - protein, 100 aa, Homo sapiens
  SITE (25): Xaa equals any of the naturally occurring L-amino acids
  SITE (43): Xaa equals any of the naturally occurring L-amino acids
  SITE (61): Xaa equals any of the naturally occurring L-amino acids
  SITE (67): Xaa equals any of the naturally occurring L-amino acids
SYYNTLIPYCQCLFAAFPHFFYIIXTVLIFFCHWDCLSDTLHXSLLLAIWKGSKGYSGGAXRPGVWXILQNRNKTPQSLPLMPSIQLFCCISCLLFKKLP

SEQ ID NO: 688 - protein, 60 aa, Homo sapiens
DLKIFPFQCCFNCISYLVFLIDSTVINHNTRQNCLLFQTRAIYMSVYMGPTASLRKCIIC

SEQ ID NO: 689 - protein, 403 aa, Homo sapiens
  SITE (183): Xaa equals any of the naturally occurring L-amino acids
SLAMRNKKILKEDELLSETQQAAFHQIAMEPFEINVPKPKRRNGVNFSLAVVVIYLILLTAGAGLLVVQVLNLQARLRVLEMYFLNDTLAAEDSPSFSLLQSAHPGEHLAQGASRLQVLQAQLTWVRVSHEHLLQRVDNFTQNPGMFRIKGEQGAPGLQGHKGAMGMPGAPGPPGPPAEKGAXGAMGRDGATGPSGPQGPPGVKGEAGLQGPQGAPGKQGATGTPGPQGEKGSKGDGGLIGPKGETGTKGEKGDLGLPGSKGDRGMKGDAGVMGPPGAQGSKGDFGRPGPPGLAGFPGAKGDQGQPGLQGVPGPPGAVGHPGAKGEPGSAGSPGRAGLPGSPGSPGATGLKGSKGDTGLQGQQGRKGESGVPGPAGVKGEQGSPGLAGPKGAPGQAARRETRE

SEQ ID NO: 690 - protein, 494 aa, Homo sapiens
  SITE (48): Xaa equals any of the naturally occurring L-amino acids
  SITE (271): Xaa equals any of the naturally occurring L-amino acids
  SITE (462): Xaa equals any of the naturally occurring L-amino acids
  SITE (463): Xaa equals any of the naturally occurring L-amino acids
  SITE (482): Xaa equals any of the naturally occurring L-amino acids
  SITE (483): Xaa equals any of the naturally occurring L-amino acids
  SITE (490): Xaa equals any of the naturally occurring L-amino acids
SRVRKFPGRPTRPTEQIRQDRSKGTVHFAVVITDGHVTGSPCGGIKLXAERAREEGIRLFAVAPNQNLKEQGLRDIASTPHELYRNDYATMLPDSTEIDQDTINRIIKVMKHEAYGECYKVSCLEIPGPSGPKGYRGQKGAKGNMGEPGEPGQKGRQGDPGIEGPIGFPGPKGVPGFKGEKGEFGADGRKGAPGLAGKNGTDGQKGKLGRIGPPGCKGDPGNRGPDGYPGEAGSPGERGDQGGKGDPGRPGRRGPPGEIGAKGSKGYQGNXGAPGSPGVKGAKGGPGPRGPKGEPGRRGDPGTKGSPGSDGPKGEKGDPGPEGPRGLAGEVGNKGAKGDRGLPGPRGPQGALGEPGKQGSRGDPGDAGPRGDSGQPGPKGDPGRPGFSYPGPRGAPGEKGEPGPRGPEGGRGDFGLKGEPGRKGEKGEPADPGPPGEPGPRGPRGVPGPEGEPGPPGDPGLXXVRKRCCALEVVFRHSTAPXXLGTTNLXWEKN

SEQ ID NO: 691 - protein, 433 aa, Homo sapiens
LVEQSGKALLGPHISEKAELGSCLRSLQGQPRRLAVPSRPLSADVNECLTIPEACKGEMKCINHYGGYLCLPRSAAVINDLHGEGPPPPVPPAQHPNPCPPGYEPDDQDSCVDVDECAQALHDCRPSQDCHNLPGSYQCTCPDGYRKIGPECVDIDECRYRYCQHRCVNLPGSFRCQCEPGFQLGPNNRSCVDVNECDMGAPCEQRCFNSYGTFLCRCHQGYELHRDGFSCSDIDECSYSSYLCQYRCVNEPGRFSCHCPQGYQLLATRLCQDIDECESGAHQCSEAQTCVNFHGGYRCVDTNRCVEPYIQVSENRCLCPASNPLCREQPSSIVHRYMTITSERSVPADVFQIQATSVYPGAYNAFQIRAGNSQGDFYIRQINNVSAMLVLARPVTGPREYVLDLEMVTMNSLMSYRASSVLRLTVFVGAYTF

SEQ ID NO: 692 - protein, 182 aa, Homo sapiens
LQRDLREGHANPTADLKSLAELGDCNEDLEQVEKCMLPECPIDCELTEWSQWSECNKSCGKGHVIRTRMIQMEPQFGGAPCPETVQRKKCRIRKCLRNPSIQKLRWREARESRRSEQLKEESEGEQFPGCRMRPWTAWSECTKLCGGGIQERYMTVKKRFKSSQFTSCKDKKEIRACNVHPC

SEQ ID NO: 693 - protein, 283 aa, Homo sapiens
  SITE (97): Xaa equals any of the naturally occurring L-amino acids
AEHFPPGKYRISCPGQESDAGDRVMVLNRSGMWQEEVTVPSVQTFLIPEAMTFEEAAALLVNYITAYMVLFDFGNLQPGHSVLVHMAAGGVGMAAVXLCRTVENVTVFGTASASKHEALKENGVTHPIDYHTTDYVDEIKKISPKGVDIVMDPLGGSDTAKGYNLLKPMGKVVTYGMANLLTGPKRNLMALARTWWNQFSVTALQLLQANRAVCGFHLGYLDGEVELVSGVVARLLALYNQGHIKPHIDSVWPFEKVADAMKQMQEKKNVGKVLLVPGPEKEN

SEQ ID NO: 694 - protein, 134 aa, Homo sapiens
GEAPDPHAARTELSAPLPATASRASLSSNMAKISSPTETERCIESLIAVFQKYAGKDGYNYTLSKTEFLSFMNTELAAFTKNQKDPGVLDRMMKKLDTNSDGQLDFSEFLNLIGGLAMACHDSFLKAVPSQKRT

SEQ ID NO: 695 - protein, 113 aa, Homo sapiens
  SITE (111): Xaa equals any of the naturally occurring L-amino acids
GSSEGSYSSQTETCPLTPSLVTGSMFAQNFLRGLSLQKSNLLPECCLASENLTLSFPSVNGHRCVAQGSETSESRAQWHGVALVVRKVIGQLYCKRNKYVVQFCKCQVCSXVL

SEQ ID NO: 696 - protein, 409 aa, Homo sapiens
  SITE (111): Xaa equals any of the naturally occurring L-amino acids
  SITE (208): Xaa equals any of the naturally occurring L-amino acids
GEREGGDCKQDSLVINLNRSNPKLKDLYIRPNIAQKRMQGSLEAHVNGFRFTSVRGDKVDILYNNIKHALFQPCDGEMIIVLHFHLKNAIMFGKKRHTDVQFYTEVGEITXDLGKHQHMHDRDDLYAEQMEREMRHKLKTAFKNFIEKVEALTKEELEFEVPFRDLGFNGAPYRSTCLLQPTSSALVNATEWPPFVVTLDEVELIHFXRVQFHLKNFDMVIVYKDYSKKVTMINAIPVASLDPIKEWLNSCDLKYTEGVQSLNWTKIMKTIVDDPEGFFEQGGWSFLEPEGEGSDAEEGDSESEIEDETFNPSEDDYEEEEEDSDEDYSSEAEESDYSKESLGSEEESGKDWDELEEEARKADRESRYEEEEEQSRSMSRKRKASVHSSGRGSNRGSRHSSAPPKKKRK

SEQ ID NO: 697 - protein, 97 aa, Homo sapiens
NTQGLIFVVDSNDRERIQEVADELQKMLLVDELRDAVLLLFANKQDLPNAMAISEMTDKLGLQSLRNRTWYVQATCATQGTGLYEGLDWLSNELSKR

SEQ ID NO: 698 - protein, 46 aa, Homo sapiens
WYPEVRHHCPNTPIILVGTKLDLRDDKDTIEKLKEKKLTPITYPQV

SEQ ID NO: 699 - protein, 126 aa, Homo sapiens
  SITE (22): Xaa equals any of the naturally occurring L-amino acids
PHTVLVEFSSVVADTQEYIIEXTADDAETREATEIIEGTQTEVDSHIMKVVQQIVHQASAGHQIIVQNVTMDEETALGPEAAAADTITIATPESLTEQVAMTLPRPSARALCLPPGQGQVALNRPL

SEQ ID NO: 700 - protein, 417 aa, Homo sapiens
ATQGVVTYYLQESGVMPYLSQLGFDVVGYGCMTCIGNSGPLPEPVVEAITQGDLVAVGVLSGNRNFEGRVHPNTRANYLASPPLVIAYAIAGTIRIDFEKEPLGVNAKGQQVFLKDIWPTRDEIQAVERQYVIPGMFKEVYQKIETVNESWNALATPSDKLFFWNSKSTYIKSPPFFENLTLDLQPPKSIVDAYVLLNLGDSVTTDHISPAGNIARNSPAARYLTNRGLTPREFNSYGSRRGNDAVMARGTFANIRLLNRFLNKQAPQTIHLPSGEILDVFDAAERYQQAGLPLIVLAGKEYGAGSSRDWAAKGPFLLGIKAVLAESYERIHRSNLVGMGVIPLEYLPGENADALGLTGQERYTIIIPENLKPQMKVQVKLDTGKTFQAVMRFDTDVELTYFLNGGILNYMIRKMAK

SEQ ID NO: 701 - protein, 145 aa, Homo sapiens
  SITE (145): Xaa equals any of the naturally occurring L-amino acids
KITVINCVIQNSYQSVLKLKHCKSGWQYSVLNTFLALVHLRNECSGGFYPRKHVVIRIVGVPIITIVFCILKKYSPHFKCFILENSLMHTCQIYIYSTNVTFLFFVLDVRACSYVRYLHKLLHYFFLCNTFLFVYVVQIYSFLKX

SEQ ID NO: 702 - protein, 317 aa, Homo sapiens
DFSNLGTTHLLRLTSSLTTKGASSFKITRGIEAVGGKLSVTATRENMAYTVECLRGDVDILMEFLLNVTTAPEFRRWEVADLQPQLKIDKAVAFQNPQTHVIENLHAAAYRNALANPLYCPDYRIGKVTSEELHYFVQNHFTSARMALIGLGVSHPVLKQVAEQFLNMRGGLGLSGAKANYRGGEIREQNGDSLVHAAFVAESAVAGSAEANAFSVLQHVLGAGPHVKRGSNTTSHLHQAVAKATQQPFDVSAFNASYSDSGLFGIYTISQATAAGDVIKAAYNQVKTIAQGNLSNTDVQAAKNKLKAGIPNVSGVF

SEQ ID NO: 703 - protein, 357 aa, Homo sapiens
  SITE (237): Xaa equals any of the naturally occurring L-amino acids
KDLVMATGLSEHHNMVWEVKTNQMPNAVQKLLLVMDKRASGMNDSLELLQCNENLPSSPGYNSCDEHMELDDLPELQAVQSDPTQSGMYQLSSDVSHQEYPRSSWNQNTSDIPETTYRENEVDWLTELANIATSPQSPLMQCSFYNRSSPVHIIATSKSLHSYARPPPVSSSSKSEPAFPHHHWKEETPVRHERANSESESGIFCMSSLSDDDDLGWCNSWPSTVWHCFLKGTRLCXHKGSNKEWQDVEDFARAEGCDNEEDLQMGIHKGYGSDGLKLLSHEESVSFGESVLKLTFDPGTVEDGLLTVECKLDHPFYVKNKGWSSFYPSLTVVQHGIPCCESSYWRCMSTSWTPRCH

SEQ ID NO: 704 - protein, 181 aa, Homo sapiens
  SITE (22): Xaa equals any of the naturally occurring L-amino acids
  SITE (56): Xaa equals any of the naturally occurring L-amino acids
SHLKKRTCGSWTASKPFLSVCXVFLLVPLLPPLQDFRGTPTSLCPSSLCPIRWQGXCVERPGRCRNQSPGQWCLSSPSLCPCAPSCPRLQPRPWTCAPVCTCRHRGEGGVFLGLPQTLPLAASLPCLHSSTITISPKLLLTQAKAASGLPSTALLHLAYHSPGPPGEPVLCSLCFRLVCAP

SEQ ID NO: 705 - protein, 377 aa, Homo sapiens
AAIRQALMPVILQDAPSAPGHAPHRQASLSISVSNSQIQENVDIATVYQIFPDEVLGSGQFGVVYGGKHRKTGRDVAVKVIDKLRFPTKQESQLRNEVAILQSLRHPGIVNLECMFETPEKVFVVMEKLHGDMLEMILSSEKGRLPERLTKFLITQILVALRHLHFKNIVHCDLKPENVLLASADPFPQVKLCDFGFARIIGEKSFRRSVVGTPAYLAPEVLLNQGYNRSLDMWSVGVIMYVSLSGTFPFNEDEDINDQIQNAAFMYPASPWSHISAGAIDLINNLLQVKMRKRYSVDKSLSHPWLQEYQTWLDLRELEGKMGERYITHESDDARWEQFAAEHPLPGSGLPTDRDLGGACPPQDHDMQGLAERISVL

SEQ ID NO: 706 - protein, 414 aa, Homo sapiens
SRAPCPPTPQEGLDDGPDFLSEEDRGLKAINVDLQSDAALQVDISDALSERDKVKFTVHTKSSLPNFKQNEFSVVRQHEEFIWLHDSFVENEDYAGYIIPPAPPRPDFDASREKLQKLGEGEGSMTKEEFTKMKQELEAEYLAIFKKTVAMHEVFLCRVAAHPILRRDLNFHVFLEYNQDLSVRGKNKKEKLEDFFKNMVKSADGVIVSGVKDVDDFFEHERTFLLEYHNRVKDASAKSDRMTRSHKSAADDYNRIGSSLYALGTQDSTDICKFFLKVSELFDKTRKIEARVSADEDLKLSDLLKYYLRESQAAKDLLYRRSRSLVDYENANKALDKARAKNKDVLQAETSQQLCCQKFEKISESAKQELIDFKTRRVAAFRKNLVELAELELKHAKGNLQLLQNCLAVLNGDT

SEQ ID NO: 707 - protein, 123 aa, Homo sapiens
ARAEFGTRFHFPYLLRASTSFFSLCPFCFSQSPRIMKVASGSTATAAAGPSCALKAGKTASGAGEVVRCLSEQSVAISRCAGGAGARLPALLDEQQVNVLLYDMNGCYSRLKELVPTLPQNRK

SEQ ID NO: 708 - protein, 115 aa, Homo sapiens
GREYLVPQQGRQFLSQKTVCSVVKIVACMFSSERVLLPYSLSASPACSCCMVIALGHQSNDCKSAWIFTCRGYSCIVRSPSPAESSLHWLAVCCVFHSFQKSYIVSLDIFKNCDF

SEQ ID NO: 709 - protein, 318 aa, Homo sapiens
  SITE (315): Xaa equals any of the naturally occurring L-amino acids
GRRDQPPVSSGRPPLWGLRGMMEALGFLKLEVNGPMVTVALSVALLALLKWYSTSAFSRLEKLGLRHPKPSPFIGNLTFFRQGFWESQMELRKLYGPLCGYYLGRRMFIVISEPDMIKQVLVENFSNFTNRMASGLEFKSVADSVLFLRDKRWEEVRGALMSAFSPEKLNEMVPLISQACDLLLAHLKRYAESGDAFDIQRCYCNYTTDVVASVAFGTPVDSWQAPEDPFVKHCKRFFEFCIPRPILVLLLSFPSIMVPLARILPNKNRDELNGFFNKLIRNVICLAGPASCRREAERLPPNGPGCPTFCKSHGXARL

SEQ ID NO: 710 - protein, 188 aa, Homo sapiens
  SITE (183): Xaa equals any of the naturally occurring L-amino acids
GCLGKRMILNKALMLGALALTTVMSPCGGEDIVADHVASYGVNLYQSYGPSGQYTHEFDGDEQFYVDLGRKETVWCLPVLRQFRFDPQFALTNIAVLKHNLNSLIKRSNSTAATNEVPEVTVFSKSPVTLGQPNILICLVDNIFPPVVNITWLSNGHSVTEGVSETSFLSKSDHSFFKISYLXLPPFC

SEQ ID NO: 711 - protein, 374 aa, Homo sapiens
  SITE (85): Xaa equals any of the naturally occurring L-amino acids
GEVLRRGKAELEEQKRLLDRTVDRLNKELEKIGEDSKQALQQLQAQLEDYKEKARREVADAQRQAKDWASEAEKTSGGLSRLQDXIQRLRQALQASQAERDTARLDKELLAQRLQGLEQEAENKKRSQDDRARQLKGLEEKVSRLETELDEEKNTVELLTDRVNRGRDQVDQLRTELMQERSARQDLECDKISLERQNKDLKTRLASSEGFQKPSASLSQLESQNQLLQERLQAEEREKTVLQSTNRKLERKVKELSIQIEDERQHVNDQKDQLSLRVKALKRQVDEAEEEIERLDGLRKKAQREVEEQHEVNEQLQARIKSLEKDSWRKASRSAAESALKNEGLSSDEEFDSVYDPSSIASLLTESNLQTSSC

SEQ ID NO: 712 - protein, 413 aa, Homo sapiens
GGFGLLGFLSALLALVLRARAGSQTPQTLLLPAAAFRRGETPRFKMSLFGTTSGFGTSGTSMFGSATTDNHNPMKDIEVTSSPDDSIGCLSFSPPTLPGNFLIAGSWANDVRCWEVQDSGQTIPKAQQMHTGPVLDVCWSDDGSKVFTASCDKTAKMWDLSSNQAIQIAQHDAPVKTIHWIKAPNYSCVMTGSWDKTLKFWDTRSSNPMMVLQLPERCYCADVIYPMAVVATAERGLIVYQLENQPSEFRRIESPLKHQHRCVAIFKDKQNKPTGFALGSIEGRVAIHYINPPNPAKDNFTFKCHRSNGTNTSAPQDIYAVNGIAFHPVHGTLATVGSDGRFSFWDKDARTKLKTSEQLDQPISACCFNHNGNIFAYASSYDWSKGHEFYNPQKKNYIFLRNAAEELKPRNKK

SEQ ID NO: 713 - protein, 374 aa, Homo sapiens
STHASAHASGPTRPGAWSAAAAGPGAGAAAAATGGGGGALEAAMAKQYDSVECPFCDEVSKYEKLAKIGQGTFGEVFKARHRKTGQKVALKKVLMENEKEGFPITALREIKILQLLKHENVVNLIEICRTKASPYNRCKGSIYLVFDFCEHDLAGLLSNVLVKFTLSEIKRVMQMLLNGLYYIHRNKILHRDMKAANVLITRDGVLKLADFGLARAFSLAKNSQPNRYTNRVVTLWYRPPELLLGERDYGPPIDLWGAGCIMAEMWTRSPIMQGNTEQHQLALISQLCGSITPEVWPNVDNYELYEKLELVKGQKRKVKDRLKAMCVTHTHWTSSTSCWCWTLPSASTAMTPSTTTSSGPTPCPPTSRACSPPT

SEQ ID NO: 714 - protein, 764 aa, Homo sapiens
  SITE (44): Xaa equals any of the naturally occurring L-amino acids
  SITE (62): Xaa equals any of the naturally occurring L-amino acids
  SITE (81): Xaa equals any of the naturally occurring L-amino acids
  SITE (125): Xaa equals any of the naturally occurring L-amino acids
  SITE (725): Xaa equals any of the naturally occurring L-amino acids
DDVQSINWLRDGVQLAESNRTRITGEEVEVQDSVPADSGLYACXTSSPSGSDTTYFSVNVSXALPSSEDDDDDDDSSSEGXETDNTKPNRMPVAPYWTSPEKMEKKLHAVPAAKTVKFKCPSSGXPNPTLRWLKNGKEFKPDHRIGGYKVRYATWSIIMDSVVPSDKGNYTCIVENEYGSINHTYQLDVVERSPHRPILQAGLPANKTVALGSNVEFMCKVYSDPQPHIQWLKHIEVNGSKIGPDNLPYVQILKTAGVNTTDKEMEVLHLRNVSFEDAGEYTCLAGNSIGLSHHSAWLTVLEALEERPAVMTSPLYLEIIIYCTGAFLISCMVGSVIVYKMKSGTKKSDFHSQMAVHKLAKSIPLRRQVTVSADSSASMNSGVLLVRPSRLSSSGTPMLAGVSEYELPEDPRWELPRDRLVLGKPLGEGCFGQVVLAEAIGLDKDKPNRVTKVAVKMLKSDATEKDLSDLISEMEMMKMIGKHKNIINLLGACTQDGPLYVIVEYASKGNLREYLQARRPPGLEYCYNPSHNPEEQLSSKDLVSCAYQVARGMEYLASKKCIHRDLAARNVLVTEDNVMKIADFGLARDIHHIDYYKKTTNGRLPVKWMAPEALFDRIYTHQSDVWSFGVLLWEIFTLGGSPYPGVPVEELFKLLKEGHRMDKPSNCTNELYMMMRDCWHAVPSQRPTFKQLVEDLDRIVALTSNQEYLDLSMPLDQYSPSFPDXRSSTCSSGEDSVFSHEPLPEEPCLPRHPAQLANGGLKRR

SEQ ID NO: 715 - protein, 160 aa, Homo sapiens
  SITE (29): Xaa equals any of the naturally occurring L-amino acids
  SITE (139): Xaa equals any of the naturally occurring L-amino acids
  SITE (145): Xaa equals any of the naturally occurring L-amino acids
  SITE (147): Xaa equals any of the naturally occurring L-amino acids
  SITE (149): Xaa equals any of the naturally occurring L-amino acids
DPTGVQGWRENLCEEREGASREFKGRCEXIMDAMKRGLCCVLLLCGAVFVSPSQEIHARFRRGARSYQVICRDEKTQMIYQQHQSWLRPVLRSNRVEYCWCNSGRAQCHSVPVKSCSEPRCFNGGTCQQACTSQISCAXAPKISXNXVXNTRPCYETRAQ

SEQ ID NO: 716 - protein, 221 aa, Homo sapiens
RSGPRTPACPGLASCTCCPLTPGKMAGPWTFTLLCGLLAATLIQATLSPTAVLILGPKVIKEKLTQELKDHNATSILQQLPLLSAMREKPAGGIPVLGSLVNTVLKHIIWLKVITANILQLQVKPSANDQELLVKIPLDMVAGFNTPLVKTIVEFHMTTEAQATIRMDTSASGPTRLVLSDCATSHGSLRIQLLHKLSFLVNALAKQVMNLLVPSMPRWPN

SEQ ID NO: 717 - protein, 195 aa, Homo sapiens
THPNQSQIQTPSSLIPPGMTLISQMFLHGERNNGGFDLSDALPDNENKKPTAIPKKPSAGDDFDLGDAVVDGENDDPRPPNPPKPMPNPNPNHPSSSGSFSDADLADGVSGGEGKGGSDGGGSHRKEGEEADAPGVIPGIVGAVVVAVAGAISSFIAYQKKKLCFKENAEQGEVDMESHRNANAEPAVQRTLLEK

SEQ ID NO: 718 - protein, 185 aa, Homo sapiens
SDRPTMAPGVARGPTPYWRLRLGGAALLLLLIPVAAAQEPPGAACSQNTNKTCEECLKNVSCLWCNTNKACLDYPVTSVLPPASLCKLSSARWGVCWVNFEALIITMSVVGGTLLLGIAICCCCCCRRKRSRKPDRSEEKAMREREERRIRQEERRAEMKTRHDEIRKKYGLFKEENPYARFENN

SEQ ID NO: 719 - protein, 567 aa, Homo sapiens
  SITE (57): Xaa equals any of the naturally occurring L-amino acids
  SITE (85): Xaa equals any of the naturally occurring L-amino acids
FRELKNTVSYSGKRKGPDSLSDGPACKRPALLHSQFLTPPQTPTPGESMEDVHLNEXKQESSADLLQNIINIKNECSPVSLNTVXVSWLNPVVVPQSSPAEQCQDFHGGQVFSPPQKCQPFQVRGSQQMIDQASLYQYSPQNQHVEQQPHYTHKPTLEYSPFPIPPQSPAYEPNLFDGPESQFCPNQSLVSLLGDQRESENIANPMQTSSSVQQQNDAHLHSFSMMPSSACEAMVGHEMASDSSNTSLPFSNMGNPMNTTQLGKSLFQWQVEQEESKLANISQDQFLSKDADGDTFLHIAVAQGRRALSYVLARKMNALHMLDIKEHNGQSAFQVAVAANQHLIVQDLVNIGAQVNTTDCWGRTPLHVCAEKGHSQVLQAIQKGAVGSNQFVDLEATNYDGLTPLHCAVIAHNAVVHELQRNQQPHSPEVQELLLKNKSLVDTIKCLIQMGAAVEAKDRKSGRTALHLAAEEANLELIRLFLELPSCLSFVNAKAYNGNTALHVAASLQYRLTQLDAVRLLMRKGADPSTRNLENEQPVHLVPDGPVGEQIRRILKGKSIQQRAPPY

SEQ ID NO: 720 - protein, 299 aa, Homo sapiens
DPRVRSHSRPTPLMANRYTMDLTAIYESLLSLSPDVPVPSDHGGTESSPGWGSSGPWSLSPSDSSPSGVTSRLPGRSTSLVEGRSCGWVPPPPGFAPLAPRLGPELSPSPTSPTATSTTPSRYKTELCRTFSESGRCRYGAKCQFAHGLGELRQANRHPKYKTELCHKFYLQGRCPTALAATSSTTLAKTWRPRATLLCFARASASPACPLAAGPHHHHQAWPALPCPPAPSRPPAPHHHLGTFHCHPLPSLLPLAPPWLEETPPQSVAPPAEGHSYQRLGALGWPGSDPLCTVPGIRP

SEQ ID NO: 721 - protein, 305 aa, Homo sapiens
  SITE (299): Xaa equals any of the naturally occurring L-amino acids
RSQLLALACLPAPLLARAFARPLLEDRGDSDHSLWLGRETEAAAAQGKRGCSGGSRKMSGEDEQQEQTIAEDLVVTKYKMGGDIANRVLRSLVEASSSGVSVLSLCEKGDAMIMEETGKIFKKEKEMKKGIAFPTSISVNNCVCHFSPLKSDQDYILKEGDLVKIDLGVHVDGFIANVAHTFVVDVAQGTQVTGRKADVIKAAHLCAEAALRLVKPGNQNTQVTEAWNKVAHSFNCTPIEGMLSHQLKQHVIDGEKTIIQNPTDQQKKDHEKAEFEVHEVYAVDVLVSSGEGKVRRVPXLAKRGD

SEQ ID NO: 722 - protein, 394 aa, Homo sapiens
AHASAATTSAADRGEMAATEGVGEAAQGGEPGQPAQPPPQPHPPPPQQQHKEEMAAEAGEAVASPMDDGFVSLDSPSYVLYRDRAEWADIDPVPQNDGPNPVVQIIYSDKFRDVYDYFRAVLQRDERSERAFKLTRDAIELNAANYTVWHFRRVLLKSLQKDLHEEMNYITAIIEEQPKNYQVWHHRRVLVEWLRDPSQELEFIADILNQDAKNYHAWQHRQWVIQEFKLWDNELQYVDQLLKEDVRNNSVWNQRYFVISNTTGYNDRAVLEREVQYTLEMIKLVPHNESAWNYLKGILQDRGLSKYPNLLNQLLDLQPSHSSPYLIAFLVDIYEDMLENQCDNKEDILNKALELCEILAKEKDTIRKEYWRYIGRSLQSKHSTENDSPTNVQQ

SEQ ID NO: 723 - protein, 337 aa, Homo sapiens
KTPKKSRVRFSNIMEIRQLPSSHALEAKLSRMSYPVKEQESILKTVGKLTATQVAKISFFFCFVWFLANLSYQEALSDTQVAIVNILSSTSGLFTLILAAVFPSNSGDRFTLSKLLAVILSIGGVVLVNLAGSEKPAGRDTVGSIWSLAGAMLYAVYIVMIKRKVDREDKLDIPMFFGFVGLFNLLLLWPGFFLLHYTGFEDFEFPNKVVLMCIIINGLIGTVLSEFLWLWGCFLTSSLIGTLALSLTIPLSIIADMCMQKVQFSWLFFAGAIPVFFSFFIVTLLCHYNNWDPVMVGIRRIFAFICRKHRIQRVPEDSEQCESLISMHSVSQEDGAS

SEQ ID NO: 724 - protein, 665 aa, Homo sapiens
  SITE (216): Xaa equals any of the naturally occurring L-amino acids
  SITE (298): Xaa equals any of the naturally occurring L-amino acids
APLDGGAAAASVASSIRQEASAMQAPRELAVGIDLGTTYSCVGVFQQGRVEILANDQGNRTTPSYVAFTDTERLVGDAAKSQAALNPHNTVFDAKRLIGRKFADTTVQSDMKHWPFRVVSEGGKPKVRVCYRGEDKTFYPEEISSMVLSKMKETAEAYLGQPVKHAVITVPAYFNDSQRQATKDAGAIAGLNVLRIINEPTAAAIAYGLDRRGAGXRNVLIFDLGGGTFDVSVLSIDAGVFEVKATAGDTHLGGEDFDNRLVNHFMEEFRRKHGKDLSGNKRALRRLRTACERAKRTXSSSTQATLEIDSLFEGVDFYTSITRARFEELCSDLFRSTLEPVEKALRDAKLDKAQIHDVVLVGGSTRIPKVQKLLQDFFNGKELNKSINPDEAVAYGAAVQAAVLMGDKCEKVQDLLLLDVAPLSLGLETAGGVMTTLIQRNATIPTKQTQTFTTYSDNQPGVFIQVYEGERAMTKDNNLLGRFELSGIPPAPRGVPQIEVTFDIDANGILSVTATDRSTGKANKITITNDKGRLSKEEVERMVHEAEQYKAEDEAQRDRVAAKNSLEAHVFHVKGSLQEESLRDKIPEEDRRKMQDKCREVLAWLEHNQLAEKEEYEHQKRELEQICRPIFSRLYGGPGVPGGSSCGTQARQGDPSTGPIIEEVD

SEQ ID NO: 725 - protein, 73 aa, Homo sapiens
  SITE (26): Xaa equals any of the naturally occurring L-amino acids
ARFIKLIFFILVVKSSLIAFCQLDFXVCVIFKGRMTGQISNKKCIELENIVVPSYPWDIRSKTPSERLKPWIV

SEQ ID NO: 726 - protein, 122 aa, Homo sapiens
TASWSPAPVPSSLERLFSPDGTFPSRRFLGLWLFFSCARLIGHLLASISVVLLPHFLFCCFSVLSKYLLCSWLPFRRQVFSFPLALLLIWLLPTKACSVRISWFSTCQNLLQPQFLGLNLYV

SEQ ID NO: 727 - protein, 150 aa, Homo sapiens
GTTTRDFTQLNELQCRFPRRLVVLGFPCNQFGHQENCQNEEILNSLKYVRPGGGYQPTFTLVQKCEVNGQNEHPVFAYLKDKLPYPYDDPFSLMTDPKLIIWSPVRRSDVAWNFEKFLIGPEGEPFRRYSRTFPTINIEPDIKRLLKVAI

SEQ ID NO: 728 - protein, 192 aa, Homo sapiens
RAGHPLHPREAPPAARSHTPKPLLMVHGWPGSFYEFYKIIPLLTDPKNHGLSDEHVFEVICPSIPGYGFSEASSKKGFNSVATARIFYKLMLRLGFQEFYIQGGDWGSLICTNMAQLVPSHVKGLHLNMALVLSNFSTLTLLLGQRFGRFLGLTERDVELLYPVKEKVFYSLMRESGYMHIQCTKPDTVALL

SEQ ID NO: 729 - protein, 466 aa, Homo sapiens
EHQEIMNNFGNEEFDCHFLDEGFTAKDILDQKINEVSSSDDKDAFYVADLGDILKKHLRWLKALPRVTPFYAVKCNDSKAIVKTLAATGTGFDCASKTEIQLVQSLGVPPERIIYANPCKQVSQIKYAANNGVQMMTFDSEVELMKVARAHPKAKLVLRIATDDSKAVCRLSVKFGATLRTSRLLLERAKELNIDVVGVSFHVGSGCTDPETFVQAISDARCVFDMGAEVGFSMYLLDIGGGFPGSEDVKLKFEEITGVINPALDKYFPSDSGVRIIAEPGRYYVASAFTLAVNIIAKKIVLKEQTGSDDEDESSEQTFMYYVNDGVYGSFNCILYDHAHVKPLLQKRPKPDEKYYSSSIWGPTCDGLDRIVERCDLPEMHVGDWMLFENMGAYTVAAASTFNGFQRPTIYYVMSGPAWQLMQQFQNPDFPPEVEEQDASTLPVSCAWESGMKRHRAACASASINV

SEQ ID NO: 730 - protein, 66 aa, Homo sapiens
WCLKVHCNWGALETACSHTTDGSLDTSSLQARQINIHNLSAFYDSELFRMNKFSHDLKRKMILQQF

SEQ ID NO: 731 - protein, 208 aa, Homo sapiens
VVAMAQVLRGTVTDFPGFDERADAETLRKAMKGLGTDEESILTLLTSRSNAQRQEISAAFKTLFGRDLLDDLKSELTGKFEKLIVALMKPSRLYDAYELKHALKGAGTNEKVLTEIIASRTPEELRAIKQVYEEEYGSSLEDDVVGDTSGYYQRMLVVLLQANRDPDAGIDEAQVEQDAQALFQAGELKWGTDEEKFITIFGTRSVLI

SEQ ID NO: 732 - protein, 421 aa, Homo sapiens
VGDCCVPYLDPEGTSLLGWLSVSLLSSGEITASSAPRMEPPGRRECPFPSWRFPGLLLAAMVLLLYSFSDACEEPPTFEAMELIGKPKPYYEIGERVDYKCKKGYFYIPPLATHTICDRNHTWLPVSDDACYRETCPYIRDPLNGQAVPANGTYEFGYQMHFICNEGYYLIGEEILYCELKGSVAIWSGKPPICEKVLCTPPPKIKNGKHTFSEVEVFEYLDAVTYSCDPAPGPDPFSLIGESTIYCGDNSVWSRAAPECKVVKCRFPVVENGKQISGFGKKFYYKATVMFECDKGFYLDGSDTIVCDSNSTWDPPVPKCLKVSTSSTTKSPASSASGPRPTYKPPVSNYPGYPKPEEGILDSLDVWVIAVIVIAIVVGVAVICVVPYRYLQRRKKKGKADGGAEYATYQTKSTTPAEQRG

SEQ ID NO: 733 - protein, 105 aa, Homo sapiens
DSMCPASTPSVLSSEQEFQMFPKSRLSSVSVTYCSVSQDFPGSNLNLLTNNSGTEWEAHPDQLLRGPRKGRIENVQESGQEAVALLHPKPRLLTRLPPLWQQRHS

SEQ ID NO: 734 - protein, 76 aa, Homo sapiens
YPSVTSGTFRRKPNSSVWCTRSSDVFPPPNVLVKQTYTSSEATFGQASRLGKCCTLCIKCASHPSPLGKFLCILQA

SEQ ID NO: 735 - protein, 72 aa, Homo sapiens
NTSIDFIRVFCQSRLFSDSSPPFLRTLNNAVVLALSRKEKVKPLFGGNIGLNSDCPFLAGPLTNHPIFFVFL

SEQ ID NO: 736 - protein, 412 aa, Homo sapiens
PAAMLRAAARFGPRLGRRLLSAAATQAVPAPNQQPEVFCNQIFINNEWHDAVSRKTFPTVNPSTGEVICQVAEGDKEDVDKAVKAARAAFQLGSPWRRMDASHRGRLLNRLADLIERDRTYLAALETLDNGKPYVISYLVDLDMVLKCLRYYAGWADKYHGKTIPIDGDFFSYTRHEPVGVCGQIIPWNFPLLMQAWKLGPALATGNVVVMKVAEQTPLTALYVANLIKEAGFPPGVVNIVPGFGPTAGAAIASHEDVDKVAFTGSTEIGRVIQVAAGSSNLKRVTLELGGKSPNIIMSDADMDWAVEQAHFALFFNQGQCCCAGSRTFVQEDIYDEFVERSVARAKSRVVGNPFDSKTEQGPQWMKLSLRRSSATSTRGSKRGRSCCVVGALLLTVVTSSSPLCLEMCRMA

SEQ ID NO: 737 - protein, 275 aa, Homo sapiens [sequence omitted]

SEQ ID NO: 738 - protein, 186 aa, Homo sapiens
KDWKNTVTDEEQTNVPYIYAIGDILEDKVELTPVAIQAGRLLAQRLYAGSTVKCDYENVPTTVFTPLEYGACGLSEEKAVEKFGEENIEVYHSYFWPLEWTIPSRDNNKCYAKIICNTKDNERVVGFHVLGPNAGEVTQGFAAALKCGLTKKQLDSTIGIHPVCAEVFTTLSVTKRSGASILQAGC

SEQ ID NO: 739 - protein, 158 aa, Homo sapiens
KVRLQVPVRNSRVDPRVRTVLCELINALYPEGQAPVKKIQASTMAFKQMEQISQFLQAAERYGINTTDIFQTVDLWEGKNMACVQRTLMNLGGLAVARDDGLFSGDPNWFPKKSKENPRNFSDNQLQEGKNVIGLQMGTNRGASQAGMTGYGMPRQIL

SEQ ID NO: 740 - protein, 47 aa, Homo sapiens
DQEGENPTTWKDFCFHCLYDVSHSYTYKSLTRGPLNCLVFCEKQIFT

SEQ ID NO: 741 - protein, 212 aa, Homo sapiens
AGDARCPPTPAPWPYPHLHPHPRIAIFRGGLGGGVRCFRATELKHKDPSPAHPAQPQLTSMPREKLPPPLPPPPTQAKARAGLRVSPAPSLTPLPPKTRLSSQTSLRSLANPLAPKEKDPGPSPITPKRGSPSSGLEPLVPPSVCPRGPLPRWPLGIKAWAALREGGRGRGWSGCAIGVSGSFSARVGVVEWGREASRAPEGSGRDENQLFT

SEQ ID NO: 742 - protein, 55 aa, Homo sapiens
HFGRPRQVDHLRSGDQPGQHGETPSLLKIQKLAGNRLNLGGGGSSEPRSWHCTPT

SEQ ID NO: 743 - protein, 188 aa, Homo sapiens
  SITE (104): Xaa equals any of the naturally occurring L-amino acids
PTRLRKRPSSQTNPSPSSSRVRDPVQERRANATGAHLDKLDQGRLVDLVNASFGKKLRDDYLASLRPRLHSIYVSEGYNAAAILTMEPVLGGTPYLDKFVVSSXRQGQGSGQMLWECLRRDLQTLFWRSRVTNPINPWYFKHSDGSFSNKQWIFFWFGLADIRDSYELVNHAKGLPDSFHKPASDPGS

SEQ ID NO: 744 - protein, 128 aa, Homo sapiens
MFPIYSRGSYGGGDGGYNGFGGDGGNYGGGPGYSSRGGYGGGGPGYGNQGGGYGGGGGYDGYNEGGNFGGGNYGGGGNYNDFGNYSGQQQSNYGPMKGGSFGGRSSGSPYGGGYGSGGGSGGYGSRRF

SEQ ID NO: 745 - protein, 241 aa, Homo sapiens
  SITE (31): Xaa equals any of the naturally occurring L-amino acids
  SITE (34): Xaa equals any of the naturally occurring L-amino acids
  SITE (39): Xaa equals any of the naturally occurring L-amino acids
  SITE (40): Xaa equals any of the naturally occurring L-amino acids
ESREQILPVTSGFEGVPGFKLESPLSVPKRXLRXSFHPXXKTSFWMLCLRTSLVHKMLHLLKFEDAKLAAAISEVVSQTPASTTQAGAPPRDTSQSDKDLDDALDKLSDSLGQRQPDPDENKPMEDKVKEKAKAEHRDKLGERDDTIPPEYRHLLDDNGQDKPVKPPTKKSEDSKKPADDQDPIDALSGDLDSCPSTTETSQNTAKDKCKKAASSSKAPKNGGKAKDSAKTTEETSKPKDD

SEQ ID NO: 746 - protein, 186 aa, Homo sapiens
QSRGPGPVTDGRGRERGGGDTMSSPSPGKRRMDTDVVKLIESKHEVTILGGLNEFVVKFYGPQGTPYEGGVWKVRVDLPDKYPFKSPSIGFMNKIFHPNIDEASGTVCLDVINQTWTALYDLTNIFESFLPQLLAYPNPIDPLNGDAAAMYLHRPEEYKQKIKEYIQKYATEEFFLHNLQFQEFNL

SEQ ID NO: 747 - protein, 40 aa, Homo sapiens
LCCFKYLGDCFIISSTKKTFNFAIETVELCHAFIRSSALC

SEQ ID NO: 748 - protein, 65 aa, Homo sapiens
  SITE (9): Xaa equals any of the naturally occurring L-amino acids
QMCLQGYGXSITNFHVYLEVFLNGIPKSRSLKMPIKVNNIYLKRTLNMPSFLIRNIFETWVFVNN

SEQ ID NO: 749 - protein, 143 aa, Homo sapiens
CRYRSGIPGSTHASAVRQAEMLDDLMEKRKEKLDSVIEFSIPDSLLIRRITGRLIHPKSGRSYHEEFNPPKEPMKDDITGEPLIRRSDDNEKALKIRLQAYHTQTTPLIEYYRKRGIHSAIDASQTPDVVFASILAAFSKATS

SEQ ID NO: 750 - protein, 136 aa, Homo sapiens
TELVLSIPRHMPAAYSRFLSWCLLALGEEAKLWLPASRAKRVRPWIETVTSIATPERNNMAVKKSRLKSKQKAQDTLQRVNQLKEENERLEAKIKLLTKELSVLKDLFLEHAHNLADNVQSISTENTTADGDNAGQ

SEQ ID NO: 751 - protein, 885 aa, Homo sapiens
  SITE (2): Xaa equals any of the naturally occurring L-amino acids
  SITE (4): Xaa equals any of the naturally occurring L-amino acids
  SITE (306): Xaa equals any of the naturally occurring L-amino acids
PXVXSKHLKDSMCNEFSQIFQLCQFVMENSQNAPLVHATLETLLRFLNWIPLGYIFETKLISTLIYKFLNVPMFRNVSLKCLTEIAGVSVSQYEEQFVTLFTLTMMQLKQMLPLNTNIRLAYSNGKDDEQNFIQNLSLFLCTFLKEHDQLIEKRLNLRETLMEALHYMLLVSEVEETEIFKICLEYWNHLAAELYRESPFSTSASPLLSGSQHFDVPPRRQLYLPMLFKVRLLMVSRMAKPEEVLVVENDQGEVVREFMKDTDSINLYKNMRETLVYLTHLDYVDTERIMTEKLHNQVNGTEWSWXNLNTLCWAIGSISGAMHEEDEKRFLVTVIKDLLGLCEQKRGKDNKAIIASNIMYIVGQYPRFLRAHWKFLKTVVNKLFEFMHETHDGVQDMACDTFIKIAQKCRRHFVQVQVGEVMPFIDEILNNINTIICDLQPQQVHTFYEAVGYMIGAQTDQTVQEHLIEKYMLLPNQVWDSIIQQATKNVDILKDPETVKQLGSILKTNVRACKAVGHPFVIQLGRIYLDMLNVYKCLSENISAAIQANGEMVTKQPLIRSMRTVKRETLKLISGWVSRSNDPQMVAENFVPPLLDAVLIDYQRNVPAAREPEVLSTMAIIVNKLGGHITAEIPQIFDAVFECTLNMINKDFEEYPEHRTNFFLLLQAVNSHCFPAFLAIPPTQFKLVLDSIIWAFKHTMRNVADTGLQILFTLLQNVAQEEAAAQSFYQTYFCDILQHIFSVVTDTSHTAGLTMHASILAYMFNLVEEGKISTSLNPGNPVNNQIFLQEYVANLLKSAFPHLQDAQVKLFVTGLFSLNQDIPAFKEHLRDFLVQIKEFAGEDTSDLFLEEREIALRQADEEKHKRQMSVPGIFNPHEIPEEMCD

SEQ ID NO: 752 - protein, 209 aa, Homo sapiens
VTFGVITSIIIWALAILASMPGLYFSKTQWEFTHHTCSLHFPHESLREWKLFQALKLNLFGLVLPLLVMIICYTGIIKILLRRPNEKKSKAVRLIFVIMIIFFLFWTPYNLTILISVFQDFLFTHECEQSRHLDLAVQVTEVIAYTHCCVNPVIYAFVGERFRKYLRQLFHRRVAVHLVKWLPFLSVDRLERVSSTSPSTGEHELSAGF

SEQ ID NO: 753 - protein, 214 aa, Homo sapiens
LSVASLSFLPNASAEDTMSRLSRSLLWAATCLGVLCVLSADKNTTQHPNVTTLAPISNVTSAPVTSLPLVTTPAPETCEGRNSCVSCFNVSVVNTTCFWIECKDESYCSHNSTVSDCQVGNTTDFCSVSTATPVPTANSTAKPTVQPSPSTTSKTVTTSGTTNNTVTPTSQPVRKSTFDAASFIGGIVLVLGVQAVIFFLYKFCKSKERNYHTL

SEQ ID NO: 754 - protein, 363 aa, Homo sapiens
  SITE (231): Xaa equals any of the naturally occurring L-amino acids
PRPREPQVLAAGDVRSPSDPRRVKANLSEVLVYSVLGVNVTSTEVYGAFTCSIQNISFSSFTLQRAGPTSHVAAVLASLLVLLALLLAALLYVKCRLNVLLWYQDAYGEVEINDGKLYDAYVSYSDCPEDRKFVNFILKPQLERRRGYKLFLDDRDLLPRAEPSADLLVNLSRCRRLIVVLSDAFLSRAWCSHSFREGLCRLLELTRRPIFITFEGQRRDPAHPALRLLRXHRHLVTLLLWRPGSVTPSSDFWKEVQLALPRKVRYRPVEGDPQTQLQDDKDPMLILRGRVPEGRALDSEVDPDPEGDLGVRGPVFGEPSAPPHTSGVSLGESRSSEVDVSDLGSRNYSARTDFYCLVSKDDM

SEQ ID NO: 755 - protein, 232 aa, Homo sapiens
PVQPTHAPGTTAAAHNTTRTAAPASTVPGPTLAPQPSSVKTGIYQVLNGSRLCIKAEMGIQLIVQDKESVFSPRRYFNIDPNATQASGNCGTRKSNLLLNFQGGFVNLTFTKDEESYYISEVGAYLTVSDPETVYQGIKHAVVMFQTAVGHSFKCVSEQSLQLSAHLQVKTTDVQLQAFDFEDDHFGNVDECSSDYTIVLPVIGAIVVGLCLMGMGVYKIRLRCQSSGYQRI

SEQ ID NO: 756 - protein, 128 aa, Homo sapiens
KLLPVVIIAVGVFLFLVAFVGCCGACKENYCLMITFAIFLSLIMLVEVAAAIAGYVFRDKVMSEFNNNFRQQMENYPKNNHTASILDRMQADFKCCGAANYTDWEKIPSMSKNRVPDSCCINVTVGLG

SEQ ID NO: 757 - protein, 257 aa, Homo sapiens
  SITE (210): Xaa equals any of the naturally occurring L-amino acids
ETRVKTSLELLRTQLEPTGTVGNTIMTSQPVPNETIIVLPSNVINFSQAEKPEPTNQGQDSLKKHLHAEIKVIGTIQILCGMMVLSLGIILASASFSPNFTQVTSTLLNSAYPFIGPFFFIISGSLSIATEKRLTKLLVHSSLVGSILSALSALVGFIILSVKQATLNPASLQCELDKNNIPTRSYVSYFYHDSLYTTDCYTAKASLAGXLSLMLICTLLEFCLAVLTAVLRWKQAYSDFPGEKDFRIIGLSQFLHS

SEQ ID NO: 758 - protein, 319 aa, Homo sapiens
PGSTHASGKIQNKWLRPSPRSHRTPESGRVLSLFRLPPPGMALSGSTPAPCWEEDECLDYYGMLSLHRMFEVVGGQLTECELELLAFLLDEAPGAAGGLARARSGLELLLELERRGQCDESNLRLLGQLLRVLARHDLLPHLARKRRRPVSPERYSYGTSSSSKRTEGSCRRRRQSSSSANSQQGQWETGSPPTKRQRRSRGRPSGGARRRRRGAPAAPQQQSEPARPSSEGKVTCDIRLRVRAEYCEHGPALEQGVASRRPQALARQLDVFGQATAVLRSRDLGSVVCDIKFSELSYLDAFWGDYLSGALLQPCGACS

SEQ ID NO: 759 - protein, 155 aa, Homo sapiens
  SITE (147): Xaa equals any of the naturally occurring L-amino acids
ESWLVLGRRKAGRLIGACGFEPPHFLTLDLEMHRDSCPLDCKVYVGNLGNNGNKTELERAFGYYGPLRSVWVARNPPGFAFVEFEDPRDAADAVRELDGRTLCGCRVRVELSNGEKRSRNRGPPPSWGRRPRDDYRRRSPPPRRRVXIMSLLTTL

SEQ ID NO: 760 - protein, 753 aa, Homo sapiens
LKKGAAEEAELEDSDDEEKPVKQDDFPKDFGPRKLKTGGNFKPSQKGFAGGTKSFMDFGSWERHTKGIGQKLLQKMGYVPGRGLGKNAQGIINPIEAKQRKGKGAVGAYGSERTTQSMQDFPVVDSEEEAEEEFQKELSQWRKDPSGSKKKPKYSYKTVEELKAKGRISKKLTAPQKELSQVKVIDMTGREQKVYYSYSQISHKHNVPDDGLPLQSQQLPQSGKEAKAPGFALPELEHNLQLLIDLTEQEIIQNDRQLQYERDMVVNLFHELEKMTEVLDHEERVISNLSKVLEMVEECERRMQPDCSNPLTLDECARIFETLQDKYYEEYRMSDRVDLAVAIVYPLMKEYFKEWDPLKDCTYGTEIISKWKSLLENDQLLSHGGQDLSADAFHRLIWEVWMPFVRNIVTQWQPRNCDPMVDFLDSWVHIIPVWILDNILDQLIFPKLQKEVENWNPLTDTVPIHSWIHPWLPLMQARLEPLYSPIRSKLSSALQKWHPSDSSAKLILQPWKDVFTPGSWEAFMVKNIVPKLGMCLGELVINPHQQHMDAFYWVIDWEGMISVSSLVGLLEKHFFPKWLQVLCSWLSNSPNYEEITKWYLGWKSMFSDQVLAHPSVKDKFNEALDIMNRAVSSNVGAYMQPGARENIAYLTHTERRKDFQYEAMQERREAENMAQRGIGVAASSVPMNFKDLIETKAEEHNIVFMPVIGKRHEGKQLYTFGRIVIYIDRGVVFVQGEKTWVPTSLQSLIDMAK

SEQ ID NO: 761 - protein, 161 aa, Homo sapiens
  SITE (9): Xaa equals any of the naturally occurring L-amino acids
VAKDMAAAXVRCIRKEIRDLYVNIQPVQEPKDQAFGNGNGIIIIAETSTGCLFAGSSLGKRGVNADKVGIEAAEMLLANLRHGGTVDEYLQDQLIVFMALANGVSRIKTGPVTLHTQTAIHFAEQIAKAKFIVKKSEDEEDAAKDTYIIECQGIGMTNPNL

SEQ ID NO: 762 - protein, 491 aa, Homo sapiens
  SITE (78): Xaa equals any of the naturally occurring L-amino acids
  SITE (158): Xaa equals any of the naturally occurring L-amino acids
  SITE (401): Xaa equals any of the naturally occurring L-amino acids
  SITE (457): Xaa equals any of the naturally occurring L-amino acids
ITCPLFLGGPSPAEDRCAIELSRRGRVPLGRHRAEPSPPAFCSKVEGYGSVCSCKDPTPIEFSPDPLPDNKVLNVPVXVIAGNRPNYLYRMLRSLLSAQGVSPQMITVFIDGYYEEPMDVVALFGLRGIQHTPISIKNARVSQHYKASLTATFNLFPXAKFAVVLEEDLDIAVDFFSFLSQSIHLLEEDDSLYCISAWNDQGYEHTAEDPALLYRVETMPGLGWVLRRSLYKEELEPKWPTPEKLWDWDMWMRMPEQRRGRECIIPDVSRSYHFGIVGLNMNGYFHEAYFKKHKFNTVPGVQLRNVDSLKKEAYEVEVHRLLSEAEVLDHSKNPCEDSFLPDTEGHTYVAFIRMEKDDDFTTWTQLAKCLHIWDLDVRGNHRGLWRLFRKKNHFLVVGVPXSPYSPGSESNLFIDCPEGLENRPNLEGLDFFLGWNAALRVGLALTQETAVPNPWTXPAGAHMLTQTHSETLRHWTRPPLSLLFVQISKAG

SEQ ID NO: 763 - protein, 53 aa, Homo sapiens
LPQLNGYIEKSTPYECGFDPISPARVPFSIKFFLVAITFLLFDLEIALLLPLP

SEQ ID NO: 764 - protein, 176 aa, Homo sapiens
HASAHASAHASGRRKKERKEKRRQRKGEECSLPGLTCFTHDNNHWQTAPFWNLGSFCACTSSNNNTYWCLRTVNETHNFLFCEFATGFLEYFDMNTDPYQLTNTVHTVERGILNQLHVQLMELRSCQGYKQCNPRPKNLDVGNKDGGSYDLHRGQLWAWMGRLISPVSLQTSTGKA

SEQ ID NO: 765 - protein, 320 aa, Homo sapiens
  SITE (2): Xaa equals any of the naturally occurring L-amino acids
  SITE (301): Xaa equals any of the naturally occurring L-amino acids
VXPGFENILFAHSSWYTYAAMLRIYKHWDFNIIDKDTSSSRLSFSSYPGFLESLDDFYILSSGLILLQTTNSVFNKTLLKQVIPETLLSWQRVRVANMMADSGKRWADIFSKYNSGTYNNQYMVLDLKKVKLNHSLDKGTLYIVEQIPTYVEYSEQTDVLRKGYWPSYNVPFHEKIYNWSGYPLLVQKLGLDYSYDLAPRAKIFRRDQGKVTDTASMKYIMRYNNYKKDPYSRGDPCNTICCREDLNSPNPSPGGCYDTKVADIYLASQYTSYAISGPTVQGGLPVFRWDRFNKTLHQGMXEVYNFDFITMKPILKLDIK

SEQ ID NO: 766 - protein, 848 aa, Homo sapiens
  SITE (2): Xaa equals any of the naturally occurring L-amino acids
  SITE (8): Xaa equals any of the naturally occurring L-amino acids
QXAYIAVXRAGGIETIANEFSDRCTPSVISFGSKNRTIGVAAKNQQITHANNTVSNFKRFHGRAFNDPFIQKEKENLSYDLVPLKNGGVGIKVMYMGEEHLFSVEQITAMLLTKLKETAENSLKKPVTDCVISVPSFFTDAERRSVLDAAQIVGLNCLRLMNDMTAVALNYGIYKQDLPSLDEKPRIVVFVDMGHSAFQVSACAFNKGKLKVLGTAFDPFLGGKNFDEKLVEHFCAEFKTKYKLDAKSKIRALLRLYQECEKLKKLMSSNSTDLPLNIECFMNDKDVSGKMNRSQFEELCAELLQKIEVPLYSLLEQTHLKVEDVSAVEIVGGATRIPAVKERIAKFFGKDISTTLNADEAVARGCALQCAILSPAFKVREFSVTDAVPFPISLIWNHDSEDTEGVHEVFSRNHAAPFSKVLTFLRRGPFELEAFYSDPQGVPYPEAKIGRFVVQNVSAQKDGEKSRVKVKVRVNTHGIFTISTASMVEKVPTEENEMSSEADMECLNQRPPENPDTDKNVQQDNSEAGTQPQVQTDAQQTSQSPPSPELTSEENKIPDADKANEKKVDQPPEAKKPKIKVVNVELPIEANLVWQLGKDLLNMYIETEGKMIMQDKLEKERNDAKNAVEEYVYEFRDKLCGPYEKFICEQDHQNFLRLLTETEDWLYEEGEDQAKQAYVDKLEELMKIGTPVKVRFQEAEERPKMFEELGQRLQHYAKIAADFRNKDEKYNHIDESEMKKVEKSVNEVMEWMNNVMNAQAKKSLDQDPVVRAQEIKTKIKELNNTCEPVVTQPKPKIESPKLERTPNGPNIDKKEEDLEDKNNFGAEPPHQNGECYPNEKNSVNMDLD

SEQ ID NO: 767 - protein, 306 aa, Homo sapiens
SSCCPLHFSASYTTANAESDNERDSDKESEDGEDEVSCETVKMGRKDSLDLEEEAASGASSALEAGGSSGLEDVLPLLQQADELHRGDEQGKREGFQLLLNNKLVYGSRQDFLWRLARAYSDMCELTEEVSEKKSYALDGKEEAEAALEKGDESADCHLWYAVLCGQLAEHESIQRRIQSGFSFKEHVDKAIALQPENPMAHFLLGRWCYQVSHLSWLEKKTATALLESPLSATVEDALQSFLKAEELQPGFSKAGRVYISKCYRELGKNSEARWWMKLALELPDVTKEDLAIQKDLEELEVILRD

SEQ ID NO: 768 - protein, 404 aa, Homo sapiens
  SITE (6): Xaa equals any of the naturally occurring L-amino acids
LSLRTXETPAPPRCEAASQGRVGWRADAAAEEAVRSVWNRTRDRGTMAPQNLSTFCLLLLYLIGAVIAGRDFYKILGVPRSASIKDIKKAYRKLALQLHPDRNPDDPQAQEKFQDLGAAYEVLSDSEKRKQYDTYGEEGLKDGHQSSHGDIFSHFFGDFGFMFGGTPRQQDRNIPRGSDIIVDLEVTLEEVYAGNFVEVVRNKPVARQAPGKRKCNCRQEMRTTQLGPGRFQMTQEVVCDECPNVKLVNEERTLEVEIEPGVRDGMEYPFIGEGEPHVDGEPGDLRFRIKVVKHPIFERRGDDLYTNVTISLVESLVGFEMDITHLDGHKVHISRDKITRPGAKLWKKGEGLPNFDNNNIKGSLIITFDVDFPKEQLTEEAREGIKQLLKQGSVQKVYNGLQGY

SEQ ID NO: 769 - protein, 123 aa, Homo sapiens
  SITE (38): Xaa equals any of the naturally occurring L-amino acids
  SITE (43): Xaa equals any of the naturally occurring L-amino acids
IEFVFLEPWVFTCLVFFCFGLSPSIKEVYSSKKKKKNXRGGPXPNSPYSESYYNSLAVVLQRRDWENPGVTQLNRLAAHPPFASWRNSEEARTDRPSQQLRSLNGEWQIVSVNILVKFALNFW

SEQ ID NO: 770 - protein, 172 aa, Homo sapiens
  SITE (1): Xaa equals any of the naturally occurring L-amino acids
XRGCVVEGNPVLAGSCDSTCSHLVVPILLLVSLGSALACLTHTPSFMLILRGVKKEDKTLAVGIQFMFLRILAWMPSPVIHGSAIDTTCVHWALSCGRRAVCRYYNNDLLRNRFIGLQFFFKTGSVICFALVLAVLRQQDKEARTKESRSSPAVEQQLLVSGPGKKPEDSRV

SEQ ID NO: 771 - protein, 465 aa, Homo sapiens
  SITE (20): Xaa equals any of the naturally occurring L-amino acids
  SITE (25): Xaa equals any of the naturally occurring L-amino acids
  SITE (104): Xaa equals any of the naturally occurring L-amino acids
RRTQYLGSPGPDRGRKQRAXCGADXGDEMTTSTLQKAIDLVTKATEEDKAKNYEEALRLYQHAVEYFLHAIKYEAHSDKAKESIRAKCVQYLDRAEKLKDYLRXKEKHGKKPVKENQSEGKGSDSDSEGDNPEKKKLQEQLMGAVVMEKPNIRWNDVAGLEGAKEALKEAVILPIKFPHLFTGKRTPWRGILLFGPPGTGKSYLAKAVATEANNSTFFSVSSSDLMSKWLGESEKLVKNLFELARQHKPSIIFIDEVDSLCGSRNENESEAARRIKTEFLVQMQGVGNNNDGTLVLGATNIPWVLDSAIRRRFEKRIYIPLPEEAARAQMFRLHLGSTPHNLTDANIHELARKTEGYSGADISIIVRDSLMQPVRKVQSATHFKKVCGPSRTNPSMMIDDLLTPCSPGDPGAMEMTWMDVPGDKLLEPVVCMSDMLRSLATTRPTVNADDLLKVKKFSEDFGQES

SEQ ID NO: 772 - protein, 467 aa, Homo sapiens
  SITE (151): Xaa equals any of the naturally occurring L-amino acids
  SITE (160): Xaa equals any of the naturally occurring L-amino acids
  SITE (445): Xaa equals any of the naturally occurring L-amino acids
LGPAGLRRRTKRRKRGDNSTDTTQGDPLSIHHYFHGYLAGFSVRSGRLESREVIECLYACREGLDYRDFESLGKGMKVHVNPSQSLLTLEGDDVETFNHALQHVAYMNTLRFATPGVRPLRLTTAVKCFSEESCVSIPEVEGYVVVLQPDXPQILLSGTXHFARPAVDFEGTNGVPLFPDLQITCSISHQVEAKKDESWQGTVTDTRMSDEIVHNLDGCEISLVGDDLDPERESLLLDTTSLQQRGLELTNTSAYLTIAGVESITVYEEILRQARYRLRHGAALYTRKFRLSCSEMNGRYSSNEFIVEVNVLHSMNRVAHPSHVLSSQQFLHRGHQPPPEMAGHSLASSHRNSMIPSAATLIIVVCVGFLVLMVVLGLVRIHSLHRRVSGAGGPPGASSDPKDPDLFWDDSALTIIVNPMESYQNRQSCVTGAVGGQQEDEDSSXSEVADSPSSDERRIIETPPHRY

SEQ ID NO: 773 - protein, 74 aa, Homo sapiens
  SITE (12): Xaa equals any of the naturally occurring L-amino acids
  SITE (30): Xaa equals any of the naturally occurring L-amino acids
  SITE (35): Xaa equals any of the naturally occurring L-amino acids
  SITE (36): Xaa equals any of the naturally occurring L-amino acids
  SITE (40): Xaa equals any of the naturally occurring L-amino acids
  SITE (41): Xaa equals any of the naturally occurring L-amino acids
  SITE (66): Xaa equals any of the naturally occurring L-amino acids
  SITE (71): Xaa equals any of the naturally occurring L-amino acids
FFKSIVNIRIIXKSNFKLQHIASKQYRDFXIPYKXXWLKXXIHIKLILFFACLFCVLVASLKFDLXLLFVXQIH

SEQ ID NO: 774 - protein, 492 aa, Homo sapiens
GASWRARTRGSRDDPSRAAAAVPAAAAAAAAVSWASRGEAAPDQDEIQRLPGLAKQPSFRQYSGYLKGSGSKHLHYWFVESQKDPENSPVVLWLNGGPGCSSLDGLLTEHGPFLVQPDGVTLEYNPYSWNLIANVLYLESPAGVGFSYSDDKFYATNDTEVAQSNFEALQDFFRLFPEYKNNKLFLTGESYAGIYIPTLAVLVMQDPSMNLQGLAVGNGLSSYEQNDNSLVYFAYYHGLLGNRLWSSLQTHCCSQNKCNFYDNKDLECVTNLQEVARIVGNSGLNIYNLYAPCAGGVPSHFRYEKDTVVVQDLGNIFTRLPLKRMWHQALLRSGDKVRMDPPCTNTTAASTYLNNPYVRKALNIPEQLPQWDMCNFLVNLQYRRLYRSMNSQYLKLLSSQKYQILLYNGDVDMACNFMGDEWFVDSLNQKMEVQRRPWLVKYGDSGEQIAGFVKEFSHIAFLTIKGAGHMVPTDKPLAAFTMFSRFLNKQPY

SEQ ID NO: 775 - protein, 464 aa, Homo sapiens
PVGPGGPQRRARAPQDARTCSQAGPASHAESYNPPPEYLLSEEERLAWEQQEPGERKLSFLPRKFPSLRAVPAYGRFIQERFERCLDLYLCPRQRKMRVNVDPEDLIPKLPRPRDLQPFPTCQALVYRGHSDLVRCLSVSPGGQWLVSGSDDGSLRLWEVATARCVRTVPVGGVVKSVAWNPSPAVCLVAAAVEDSVLLLNPALGDRLVAGSTDQLLSAFVPPEEPPLQPARWLEASEEERQVGLRLRICHGKPVTQVTWHGRGDYLAVVLATQGHTQVLIHQLSRRRSQSPFRRSHGQVQRVAFHPARPFLLVASQRSVRLYHLLRQELTKKLMPNCKWVSSLAVHPAGDNVICGSYDSKLVWFDLDLSTKPYRMLRHHKKALRAVAFHPRYPLFASGSDDGSVIVCHGMVYNDLLQNPLLVPVKVLKGHVLTRDLGVLDVIFHPTQPWVFSSGADGTVRLFT

SEQ ID NO: 776 - protein, 339 aa, Homo sapiens
VVNSSFPATRNRTVGTISKHLDWHRKEEKEHLKGVQDPQHERIITVSTNGSIHSPRFPHTYPRNTVLVWRLVAVEENVWIQLTFDERFGLEDPEDDICKYDFVEVEEPSDGTILGRWCGSGTVPGKQISKGNQIRIRFVSDEYFPSEPGFCIHYNIVMPQFTEAVSPSVLPPSALPLDLLNNAITAFSTLEDLIRYLEPERWQLDLEDLYRPTWQLLGKAFVFGRKSRVVDLNLLTEEVRLYSCTPRNFSVSIREELKRTDTIFWPGCLLVKRCGGNCACCLHNCNECQCVPSKVTKKYHEVLQLRPKTGVRGLHKSLTDVALEHHEECDCVCRGSTGG

SEQ ID NO: 777 - protein, 194 aa, Homo sapiens
  SITE (22): Xaa equals any of the naturally occurring L-amino acids
  SITE (155): Xaa equals any of the naturally occurring L-amino acids
PRRFQRGGSTPRVGVCARPGPXGHVAPGGERMSFRGGGRGGFNRGGGGGGFNRGGSSNHFRGGGGGGGGGNFRGGGRGGFGRGGGRGGFNKGQDQGPPERVVLLGEFLHPCEDDIVCKCTTDENKVPYFNAPVYLENKEQIGKVDEIFGQLRDFXFSVKLSENMKASSFKKLQKFYIDPYKLLPLQRWWQRRWF

SEQ ID NO: 778 - protein, 117 aa, Homo sapiens
AGAVIIGFRSKIKNALAHFLPQGTPTPLIPILVIIETISLLIQPIALAVRLTANITAGHLLMHLIGSATLAISTINLPSTLIIFTILILLTILEIAVALIQAYVFTLLVSLYLHDNT

SEQ ID NO: 779 - protein, 429 aa, Homo sapiens
  SITE (5): Xaa equals any of the naturally occurring L-amino acids
  SITE (13): Xaa equals any of the naturally occurring L-amino acids
  SITE (388): Xaa equals any of the naturally occurring L-amino acids
GGRTXSSPEKDPXARVPSSGFPNPGDSAPGRCYGRHFHSVPGGQRSRRSPVAGQHGERPQPGLLQYKADINAVNEHGNVPLHYACFWGQDQVAEDLVANGALVSICNKYGEMPVDKAKAPLRELLRERAEKMGQNLNRIPYKDTFWKGTTRTRPRNGTLNKHSGIDFKQLNFLTKLNENHSGELWKGRWQGNDIVVKVLKVRDWSTRKSRDFNEECPRLRIFSHPNVLPVLGACQSPPAPHPTLITHWMPYGSLYNVLHEGTNFVVDQSQAVKFALDMARGMAFLHTLEPLIPRHALNSRSVMIDEDMTARISMADVKFSFQCPGRMYAPAWVAPEALQKKPEDTNRRSADMWSFAVLLWELVTREVPFADLSNMEIGMKVALEGLRXTIPPGISPHVCKLMKICMNEDPAKRPKFDMIVPILEKMQDK

SEQ ID NO: 780 - protein, 793 aa, Homo sapiens
GSLAARPRHTRSPGLSASAGETAMAQWNQLQQLDTRYLEQLHQLYSDSFPMELRQFLAPWIESQDWAYAASKESHATLVFHNLLGEIDQQYSRFLQESNVLYQHNLRRIKQFLQSRYLEKPMEIARIVARCLWEESRLLQTAATAAQQGGQANHPTAAVVTEKQQMLEQHLQDVRKRVQDLEQKMKVVENLQDDFDFNYKTLKSQGDMQDLNGNNQSVTRQKMQQLEQMLTALDQMRRSIVSELAGLLSAMEYVQKTLTDEELADWKRRQQIACIGGPPNICLDRLENWITSLAESQLQTRQQIKKLEELQQKVSYKGDPIVQHRPMLEERIVELFRNLMKSAFVVERQPCMPMHPDRPLVIKTGVQFTTKVRLLVKFPELNYQLKIKVCIDKDSGDVAALRGSRKFNILGTNTKVMNMEESNNGSLSAEFKHLTLREQRCGNGGRANCDASLIVTEELHLITFETEVYHQGLKIDLETHSLPVVVISNICQMPNAWASILWYNMLTNNPKNVNFFTKPPIGTWDQVAEVLSWQFSSTTKRGLSIEQLTTLAEKLLGPGVNYSGCQITWAKFCKENMAGKGFSFWVWLDNIIDLVKKYILALWNEGYIMGFISKERERAILSTKPPGTFLLRFSESSKEGGVTFTWVEKDISGKTQIQSVEPYTKQQLNNMSFAEIIMGYKIMDATNILVSPLVYLYPDIPKEEAFGKYCRPESQEHPEADPGSAAPYLKTKFICVTPTTCSNTIDLPMSPRTLDSLMQFGNNGEGAEPSAGGQFESLTFDMELTSECATSPM

SEQ ID NO: 781 - protein, 338 aa, Homo sapiens
  SITE (313): Xaa equals any of the naturally occurring L-amino acids
  SITE (319): Xaa equals any of the naturally occurring L-amino acids
VSLPVVPASFSFPPCPAAGPGQPGSGWGGVLPSSSWDIARVRSTPSQPLLWSPVGRGAAILVARGVSRIRRVSLPSRWRGLCPCSVTAALGKRSAPKTDVTITNDGATILKLLEVEHPAAKVLCELADLQDKEVGDGTTSVVIIAAELLKNADELVKQKIHPTSVISGYRLACKEAVRYINENLIVNTDELGRDCLINAAKTSMSSKIIGINGDFFANMVVDAVLAIKYTDIRGQPRYPVNSVNILKAHGRSQMESMLISGYALNCVVGSQGMPKRIVNAKIACLDFSLQKTKMKLGVQVVITDPEKLDQIRXSNYSVXPGPIWKVKKLLKCNVGTGR

SEQ ID NO: 782 - protein, 100 aa, Homo sapiens
ILHLNALMKNKAKTRVLGHSSAQRVPGDGRPLSPHPLTLENWVFSQYSSNSFLKAVEPLYSKVHCRCSNSPFLFPLPPASFADSQLVMSVSIKDIMLLRF

SEQ ID NO: 783 - protein, 312 aa, Homo sapiens [sequence omitted]

SEQ ID NO: 784 - protein, 73 aa, Homo sapiens
  SITE (9): Xaa equals any of the naturally occurring L-amino acids
  SITE (68): Xaa equals any of the naturally occurring L-amino acids
RGPALRAAXTIKWRVLQPAPASEREMLGCSFKLRTTHHAYPGAEGPDHHSLRTEEAACYSWCCIPPDXLLFPG

SEQ ID NO: 785 - protein, 517 aa, Homo sapiens
GKREGAGERDQGRRRGESREGWSFGESLWKMAPVVTGKFGERPPPKRLTREAMRNYLKERGDQTVLILHAKVAQKSYGNEKRFFCPPPCVYLMGSGWKKKKEQMERDGCSEQESQPCAFIGIGNSDQEMQQLNLEGKNYCTAKTLYISDSDKRKHFMLSVKMFYGNSDDIGVFLSKRIKVISKPSKKKQSLKNADLCIASGTKVALFNRLRSQTVSTRYLHVEGGNFHASSQQWGAFFIHLLDDDESEGEEFTVRDGYIHYGQTVKLVCSVTGMALPRLIIRKVDKQTALLDADDPVSQLHKCAFYLKDTERMYLCLSQERIIQFQATPCPKEPNKEMINDGASWTIISTDKAEYTFYEGMGPVLAPVTPVPVVESLQLNGGGDVAMLELTGQNFTPNLRVWFGDVEAETMYRCGESMLCVVPDISAFREGWRWVRQPVQVPVTLVRNDGIIYSTSLTFTYTPEPGPRPHCSAAGAILRANSSQVPPNESNTNSEGSYTNASTNSTSVTSSTATVVS

SEQ ID NO: 786 - protein, 211 aa, Homo sapiens
  SITE (122): Xaa equals any of the naturally occurring L-amino acids
  SITE (199): Xaa equals any of the naturally occurring L-amino acids
PCILGVERRMETESGNQEKVMEEESTEKKKEVEKKKRSRVKQVLADIAKQVDFWFGDANLHKDRFLREQIEKSRDGYVDISLLVSFNKMKKLTTDGKLIARALRSSAVVELDLEGTRIRRKXPLGERPKDEDERTVYVELLPKNVNHSWIERVFGKCGNVVYISIPHYKSTGDPKGFAFVEFETKEQAAKAIEVSPDPXKKKRKKRKQVLK

SEQ ID NO: 787 - protein, 58 aa, Homo sapiens
  SITE (14): Xaa equals any of the naturally occurring L-amino acids
  SITE (21): Xaa equals any of the naturally occurring L-amino acids
  SITE (22): Xaa equals any of the naturally occurring L-amino acids
HSRGVAGTITLFRXSYSSAVXXSQLLHQMRFFCSLMFFGYGYGICRLGGKELKITGAG

SEQ ID NO: 788 - protein, 471 aa, Homo sapiens
  SITE (448): Xaa equals any of the naturally occurring L-amino acids
NDLTYDMEILQPLLEQGASLRQTMTYEQPKEAIVIRKKIENLTSAVNSLNFIIKELTKRHNLLRNEVQGRDDALERRINEYALEMEDGLNKTMTIINNAIDFIQDNYALKETLSTIKDNSEIHHKCTSDMETILTFIPQFHRLNDSIQTLVNDNQRYNFVLQVAKTLAGIPRDEKLNQSNFQKMYQMFNETTSQVRKYQQNMSHLEEKLLLTTKISKNFETRLQDIESKVTQTLIPYYISVKKGSVVTNERDQALQLQVLNSRFKALEAKSIHLSINFFSLNKTLHEVLTMCHNASTSVSELNATIPKWIKHSLPDIQLLQKGLTEFVEPIIQIKTQAALSNLTCCIDRSLPGSLANVVKSQKQVKSLPKKINALKKPTVNLTTVLIGRTQRNTDNIIYPEEYSSCSRHPCQNGGTCINGRTSFTCACRHPFTGDNCTIKLVEENALXQIFPKDLTDMHPWWHFLHLIRME

SEQ ID NO: 789 - protein, 328 aa, Homo sapiens
  SITE (29): Xaa equals any of the naturally occurring L-amino acids
  SITE (66): Xaa equals any of the naturally occurring L-amino acids
  SITE (125): Xaa equals any of the naturally occurring L-amino acids
  SITE (130): Xaa equals any of the naturally occurring L-amino acids
  SITE (135): Xaa equals any of the naturally occurring L-amino acids
  SITE (152): Xaa equals any of the naturally occurring L-amino acids
  SITE (312): Xaa equals any of the naturally occurring L-amino acids
  SITE (319): Xaa equals any of the naturally occurring L-amino acids
HGVHGGGDRGFALGGHEREPASGRPGAKXLHLLLVAEPHGQEDHAGQGEDPREVRARVGAAAARAXDEIIDRCLVGPRAPAPRDPGDSEELTRFPGLRGPTGQKVVRFGDEDLTWQDEHSAPFSXGKQRXRLEFXISALSIQEPSNGTALSXPRPLSKASQGSQALKSSQGSRSSSLDALGPTRKEEEASFWKINAERSRGEGPEAEFQSLTPSQIKSMEKGEKVLPPCYRQEPAPKDREAKVERPSTLRQEQRPLPNVSTERERPQPVQAFSSALHEAAPSQLEGKLPSPDVRQDDGEDTLFSEPKFAQVXSSNVVLXTGFDFLDNW

SEQ ID NO: 790 - protein, 142 aa, Homo sapiens
  SITE (33): Xaa equals any of the naturally occurring L-amino acids
AAEARARPGVTLRPFAPLSGAAEADEGGGDWSXIDCEMEEVDLQDLPSATIACHLDPRVFVDGLCRAKFESLFRTYDKDITFQYFKSFKRVRINFSNPFSAADARLQLHKTEFLGKEMKLYFAQTLHIGSSHLAPQIQTSSF

SEQ ID NO: 791 - protein, 322 aa, Homo sapiens
AGGPRAAHPVCLCLLQSSVLALVRLRPGCTAGTWAMSPHPTALLGLVLCLAQTIHTQEEDLPRPSISAEPGTVIPLGSHVTFVCRGPVGVQTFRLERESRSTYNDTEDVSQASPSESEARFRIDSVSEGNAGPYRCIYYKPPKWSEQSDYLELLVKETSGGPDSPDTEPGSSAGPTQRPSDNSHNEHAPASQGLKAEHLYILIGVSVVFLFCLLLLVLFCLHRQNQIKQGPPRSKDEEQKPQQRPDLAVDVLERTADKATVNGLPEKDRETDTSALAAGSSQEVTYAQLDHWALTQRTARAVSPQSTKPMAESITYAAVARH

SEQ ID NO: 792 - protein, 97 aa, Homo sapiens
PLLCLPSIMKGLAAALLVLVCTMALCSCAQVGTNKELCCLVYTSWQIPQKFIVDYSETSPQCPKPGVILLTKRGRQICADPNKKWVQKYISDLKLNA

SEQ ID NO: 793 - protein, 267 aa, Homo sapiens
PPGLPGFGTSHTFAPAAMTLSPLLLFLPPLLLLLDVPTAAVQASPLQALDFFGNGPPVNYKTGNLYLRGPLKKSNAPLVNVTLYYEALCGGCRAFLIRELFPTWLLVMEILNVTLVPYGNAQEQNVSGRWEFKCQHGEEECKFNKVEACVLDELDMELAFLTIVCMEEFEDMERSLPLCLQLYAPGLSPDTIMECAMGDRGMQLMHANAQRTDALQPPHEYVPWVTVNGKPLEDQTQLLTLVCQLYQGKKPDVCPSSTSSLRSVCFK

SEQ ID NO: 794 - protein, 297 aa, Homo sapiens
QYRSGIPGSTHASAASTRPQFLITVPVLTVINYRPHNMRPEDRMFHIRAVILRALSLAFLLSLRGAGAIKADHVSTYAAFVQTHRPTGEFMFEFDEDEMFYVDLDKKETVWHLEEFGQAFSFEAQGGLANIAILNNNLNTLIQRSNHTQATNDPPEVTVFPKEPVELGQPNTLICHIDKFFPPVLNVTWLCNGELVTEGVAESLFLPRTDYSFHKFHYLTFVPSAEDFYDCRVEHWGLDQPLLKHWEAQEPIQMPETTETVLCALGLVLGLVGIIVGTVLIIKSLRSGHDPRAQGTL

SEQ ID NO: 795 - protein, 113 aa, Homo sapiens
  SITE (39): Xaa equals any of the naturally occurring L-amino acids
  SITE (61): Xaa equals any of the naturally occurring L-amino acids
IGWEVSFWICFETVPERRLPFPRHFHRQQFGDSFAAKYXLVNYFPAQRLRAKQQMRVSVPXKSEDVAIERTVFSYVSRLSYATVSKPAPTVRKCVRHRTQLAMCFLSQGDTCI

SEQ ID NO: 796 - protein, 415 aa, Homo sapiens
KMSEYIRVTEDENDEPIEIPSEDDGTVLLSTVTAQFPGACGLRYRNPVSQCMRGVRLVEGILHAPDAGWGNLVYVVNYPKDNKRKMDETDASSAVKVKRAVQKTSDLIVLGLPWKTTEQDLKEYFSTFGEVLMVQVKKDLKTGHSKGFGFVRFTEYETQVKVMSQRHMIDGRWCDCKLPNSKQSQDEPLRSRKVFVGRCTEDMTEDELREFFSQYGDVMDVFIPKPFRAFAFVTFADDQIAQSLCGEDLIIKGISVHISNAEPKHNSNRQLERSGRFGGNPGGFGNQGGFGNSRGGGAGLGNNQGSNMGGGMNFGAFSINPAMMAAAQAALQSSWGMMGMLASQQNQSGPSGNNQNQGNMQREPNQAFGSGNNSYSGSNSGAAIGWGSASNAGSGSGFNGGFGSSMDSKSSGWGM

SEQ ID NO: 797 - protein, 609 aa, Homo sapiens
  SITE (170): Xaa equals any of the naturally occurring L-amino acids
  SITE (446): Xaa equals any of the naturally occurring L-amino acids
  SITE (506): Xaa equals any of the naturally occurring L-amino acids
  SITE (577): Xaa equals any of the naturally occurring L-amino acids
  SITE (583): Xaa equals any of the naturally occurring L-amino acids
  SITE (584): Xaa equals any of the naturally occurring L-amino acids
  SITE (599): Xaa equals any of the naturally occurring L-amino acids
  SITE (608): Xaa equals any of the naturally occurring L-amino acids
LTALRWLLRGQEKRTLGSSQSDFLTPPVGGAPWAVATTVVMYPPPPPPPHRDFISVTLSFGESYDNSKSWRRRSCWRKWKQLSRLQRNMILFLLAFLLFCGLLFYINLADHWKALAFRLEEEQKMRPEIAGLKPANPPVLPAPQKADTDPENLPEISSQKTQRHIQRGPXHLQIRPPSQDLKDGTQEEATKRQEAPVDPRPEGDPQRTVISWRGAVIEPEQGTELPSRRAEVPTKPPLPPARTQGTPVHLNYRQKGVIDVFLHAWKGYRKFAWGHDELKPVSRSFSEWFGLGLTLIDALDTMWILGLRKEFEEARKWVSKKLHFEKDVDVNLFESTIRILGGLLSAYHLSGDSLFLRKAEDFGNRLMPAFRTPSKIPYSDVNIGTGVAHPPRWTSDSTVAEVTSIQLEFRELSRLTGDKKFQEAVEKVTQHIHGLSGKKDGLVPCXINTHSGLFTHLGVFTLGARADSYYEYLLKQWIQGGKQETQLLEDYVEAIEGVRTHLLRHXEPSKLTFVGELAHGRFSAKMDHLVCFLPGTLALGVYHGLPASHMELAQELMETCYQMNRQMETGLSPEIVXFNFTPXXPGGPGSGGNRLGKGXPKRAPKGPXE

SEQ ID NO: 798 - protein, 106 aa, Homo sapiens
LLPHPGRMLTFMEADMCTQNQREPVILSWRSQKTSAYSSFRWMAQESSEPMGDLIYYHIRLLGMNICVIFPNDLTLFYLCIQFLCHNVLFCFSFSIVEEGRSSKLL

SEQ ID NO: 799 - protein, 114 aa, Homo sapiens [sequence omitted]

SEQ ID NO: 800 - protein, 363 aa, Homo sapiens
  SITE (358): Xaa equals any of the naturally occurring L-amino acids
NISIRREYIKQNPMATEKLLSLLPEYVVPYMIHLLAHDPDFTRSQDVDQLRDIKECLWFMLEVLMTKNENNSHAFMKKMAENIKLTRDAQSPDESKTNEKLYTVCDVALCVINSKSALCNADSPKDPVLPMKFFTQPEKDFCNDKSYISEETRVLLLTGKPKPAGVLGAVNKPLSATGRKPYVRSTGTETGSNINVNSELNPSTGNRSREQSSEAAETGVSENEENPVRIISVTPVKNIDPVKNKEINSDQATQGNISSDRGKKRTVTAAGAENIQQKTDEKVDESGPPAPSKPRRGRRPKSESQGNATKNDDLNKPINKGRKRAAVGQESPGGLEAGNAKAPKLQDLAKKAAPAERXIDLQR

SEQ ID NO: 801 - protein, 581 aa, Homo sapiens
  SITE (1): Xaa equals any of the naturally occurring L-amino acids
XSSNTTHYRGGSASEAAMSYPADDYESEAAYDPYAYPSDYDMHTGDPKQDLAYERQYEQQTYQVIPEVIKNFIQYFHKTVSDLIDQKVYELQASRVSSDVIDQKVYEIQDIYENSWTKLTERFFKNTPWPEAEAIAPQVGNDAVFLILYKELYYRHIYAKVSGGPSLEQRFESYYNYCNLFNYILNADGPAPLELPNQWLWDIIDEFIYQFQSFSQYRCKTAKKSEEEIDFLRSNPKIWNVHSVLNVLHSLVDKSNINRQLEVYTSGGDPESVAGEYGRHSLYKMLGYFSLVGLLRLHSLLGDYYQAIKVLENIELNKKSMYSRVPECQVTTYYYVGFAYLMMRRYQDAIRVFANILLYIQRTKSMFQRTTYKYEMINKQNEQMHALLAIALTMYPMRIDESIHLQLREKYGDKMLRMQKGDPQVYEELFSYSCPKFLSPVVPNYDNVHPNYHKEPFLQQLKVFSDEVQQQAQLSTIRSFLKLYTTMPVAKLAGFLDLTEQEFRIQLLVFKHKMKNLVWTSGISALDGEFQSASEVDFYIDKDMIHIADTKVARRYGDFFIRQIHKFEELNRTLKKMGQRP

SEQ ID NO: 802 - protein, 302 aa, Homo sapiens
ASEPWASELWLWVDGGDTPRRRRREGRRGLHLHASRLPLPSAPGPCSSLQDQAMELEVRRVRQAFLSGRSRPLRFRLQQLEALRRMVQEREKDILTAIAADLCKSEFNVYSQEVITVLGEIDFMLENLPEWVTAKPVKKNVLTMLDEAYIQPQPLGVVLIIGAWNYPFVLTIQPLIGAIAAGNAVIIKPSELSENTAKILAKLLPQYLDQDLYIVINGGVEETTELLKQRFDHIFYTGNTAVGKIVMEAAAKHLTPVTLELGGKSPCYIDKDCDLGHCLQTHNLGKIHELWPNLHCTRLYSL

SEQ ID NO: 803 - protein, 44 aa, Homo sapiens
PLGRLRQENRLNPGGGGCSEPRSHHCTPAWVMERDSISKKKLCM

SEQ ID NO: 804 - protein, 97 aa, Homo sapiens
  SITE (6): Xaa equals any of the naturally occurring L-amino acids
  SITE (8): Xaa equals any of the naturally occurring L-amino acids
  SITE (11): Xaa equals any of the naturally occurring L-amino acids
  SITE (14): Xaa equals any of the naturally occurring L-amino acids
  SITE (15): Xaa equals any of the naturally occurring L-amino acids
  SITE (23): Xaa equals any of the naturally occurring L-amino acids
  SITE (33): Xaa equals any of the naturally occurring L-amino acids
  SITE (38): Xaa equals any of the naturally occurring L-amino acids
  SITE (52): Xaa equals any of the naturally occurring L-amino acids
  SITE (53): Xaa equals any of the naturally occurring L-amino acids
  SITE (69): Xaa equals any of the naturally occurring L-amino acids
  SITE (79): Xaa equals any of the naturally occurring L-amino acids
  SITE (87): Xaa equals any of the naturally occurring L-amino acids
  SITE (93): Xaa equals any of the naturally occurring L-amino acids
  SITE (97): Xaa equals any of the naturally occurring L-amino acids
AILRLXLXGRXLTXXLMKILVEXRLQLHHHGRXGKSCXTSRRSCATSPWDFXXEMATAASSSSLEKSYXLPDGQVITIXNERFRCPXGAVPAXPSWX

SEQ ID NO: 805 - protein, 65 aa, Homo sapiens
  SITE (60): Xaa equals any of the naturally occurring L-amino acids
YTLLELELPRLLAPDLPSNGSSLKDLKWTHSNYRASKESCIVIFRHYLPGSGVGNLRACXLPWMW

SEQ ID NO: 806 - protein, 58 aa, Homo sapiens
  SITE (43): Xaa equals any of the naturally occurring L-amino acids
  SITE (44): Xaa equals any of the naturally occurring L-amino acids
  SITE (45): Xaa equals any of the naturally occurring L-amino acids
  SITE (53): Xaa equals any of the naturally occurring L-amino acids
EQGQSNNNSDTCAEFRIKYVGAIEKLKLSEGKGLEGPLRPDKXXXTLAQQGWXVCLLF

SEQ ID NO: 807 - protein, 63 aa, Homo sapiens
  SITE (3): Xaa equals any of the naturally occurring L-amino acids
  SITE (6): Xaa equals any of the naturally occurring L-amino acids
  SITE (8): Xaa equals any of the naturally occurring L-amino acids
  SITE (9): Xaa equals any of the naturally occurring L-amino acids
  SITE (10): Xaa equals any of the naturally occurring L-amino acids
  SITE (13): Xaa equals any of the naturally occurring L-amino acids
  SITE (14): Xaa equals any of the naturally occurring L-amino acids
  SITE (15): Xaa equals any of the naturally occurring L-amino acids
  SITE (49): Xaa equals any of the naturally occurring L-amino acids
IRXSSXWXXXRGXXXIEDYRGNVGVVLFNFGKEKFEVKKGDRIAQLHLXTDFLSRNRRSSSLG

SEQ ID NO: 808 - protein, 161 aa, Homo sapiens
  SITE (142): Xaa equals any of the naturally occurring L-amino acids
  SITE (147): Xaa equals any of the naturally occurring L-amino acids
  SITE (152): Xaa equals any of the naturally occurring L-amino acids
ASQLPDYSISPPSLPPRISFHPSPTLARVAMAEPSAATQSHSISSSSFGAEPSAPGGGGSPGACPALGTKSCSSSCAVHDLIFWRDVKKTGFVFGTTLIMLLSLAAFSVISVVSYLILALLSVTISFRIYKSVIQAVQKSEXGHPFXAYLDXTLLCPQNFP

SEQ ID NO: 809 - protein, 61 aa, Homo sapiens
  SITE (7): Xaa equals any of the naturally occurring L-amino acids
  SITE (22): Xaa equals any of the naturally occurring L-amino acids
ETPAGCXINSSSASSPASHLLXAPRQSAQSHVHPRSALSPAHHQSVHSPAHLSSASRNVLL

SEQ ID NO: 810 - protein, 87 aa, Homo sapiens
  SITE (13): Xaa equals any of the naturally occurring L-amino acids
  SITE (44): Xaa equals any of the naturally occurring L-amino acids
  SITE (76): Xaa equals any of the naturally occurring L-amino acids
TEVARVRLLRPSXAAAMRYVASYLLAALGGNSSPSAKDIKKILXSVGIEADDDRLNKVISELNGKNIEDVIAQGIXKLASVPAGWGL

SEQ ID NO: 811 - protein, 100 aa, Homo sapiens
  SITE (11): Xaa equals any of the naturally occurring L-amino acids
  SITE (14): Xaa equals any of the naturally occurring L-amino acids
  SITE (35): Xaa equals any of the naturally occurring L-amino acids
  SITE (36): Xaa equals any of the naturally occurring L-amino acids
  SITE (40): Xaa equals any of the naturally occurring L-amino acids
  SITE (47): Xaa equals any of the naturally occurring L-amino acids
  SITE (64): Xaa equals any of the naturally occurring L-amino acids
  SITE (87): Xaa equals any of the naturally occurring L-amino acids
  SITE (89): Xaa equals any of the naturally occurring L-amino acids
  SITE (91): Xaa equals any of the naturally occurring L-amino acids
  SITE (92): Xaa equals any of the naturally occurring L-amino acids
  SITE (93): Xaa equals any of the naturally occurring L-amino acids
  SITE (94): Xaa equals any of the naturally occurring L-amino acids
  SITE (99): Xaa equals any of the naturally occurring L-amino acids
  SITE (100): Xaa equals any of the naturally occurring L-amino acids
APSCSWLSSGXRSXPDFPTPGVVFRDISPVLKDPXXFRAXIGLLARXLKATHGGRIDYIAGLDXRRVPLLALPGPGALDWAAWLIRXRXEXXXXPILWXX

SEQ ID NO: 812 - protein, 85 aa, Homo sapiens
  SITE (78): Xaa equals any of the naturally occurring L-amino acids
TSQVRQNYHQDSEAAINRQINLELYASYVYLSMSYYFDRDDVALKNFAKYFLHQSHEEREHAEKLMKLQNHEVAESSXGYQETRL

SEQ ID NO: 813 - protein, 88 aa, Homo sapiens
  SITE (5): Xaa equals any of the naturally occurring L-amino acids
  SITE (10): Xaa equals any of the naturally occurring L-amino acids
  SITE (15): Xaa equals any of the naturally occurring L-amino acids
  SITE (17): Xaa equals any of the naturally occurring L-amino acids
  SITE (19): Xaa equals any of the naturally occurring L-amino acids
  SITE (43): Xaa equals any of the naturally occurring L-amino acids
  SITE (68): Xaa equals any of the naturally occurring L-amino acids
  SITE (73): Xaa equals any of the naturally occurring L-amino acids
  SITE (76): Xaa equals any of the naturally occurring L-amino acids
  SITE (84): Xaa equals any of the naturally occurring L-amino acids
  SITE (85): Xaa equals any of the naturally occurring L-amino acids
KLVRXPVQVXGIEGXYXTXLYSAASKQNKLEQVEKELLRVAQXLKEPKVAASVLNPYVKRSIKVKSLXDITAXERXSPLHYQPXXFAC

SEQ ID NO: 814 - protein, 133 aa, Homo sapiens
  SITE (125): Xaa equals any of the naturally occurring L-amino acids
  SITE (131): Xaa equals any of the naturally occurring L-amino acids
AGAVIIGFRSKIKNALAHFLPQGTPTPLIPILVIIETISLLIQPIALAVRLTANITAGHLLMHLIGSATLAISTINLPSTLIIFTILILLTILEIAVALIQAYVFTLLVKPLPARQHIKKKKKKXKGGAGXQS

SEQ ID NO: 815 - protein, 110 aa, Homo sapiens
  SITE (2): Xaa equals any of the naturally occurring L-amino acids
  SITE (24): Xaa equals any of the naturally occurring L-amino acids
  SITE (36): Xaa equals any of the naturally occurring L-amino acids
  SITE (42): Xaa equals any of the naturally occurring L-amino acids
  SITE (56): Xaa equals any of the naturally occurring L-amino acids
  SITE (65): Xaa equals any of the naturally occurring L-amino acids
  SITE (70): Xaa equals any of the naturally occurring L-amino acids
WXPRAAGIRHEVAKMVKPKYKGRXTINPSKASTNPXRVQGAXGQNMRDRATIRRLXMYRQKERRXSRGKXIKPLQYQSTVASGTVARVEPNIKWFGNTRVIKQSSLQKFQ

SEQ ID NO: 816 - protein, 122 aa, Homo sapiens
KNALEKYGPLKPLPQTPHLEEDLKEVLRSEAGIELIIEDDIRPEKQKRKPGLRRSPIKKVRKSLALDIVDEDVKLMMSTLPKSLSLPTTAPSNSSSLTLSGIKEDNSFSQAHVRPGLISDPA

SEQ ID NO: 817 - protein, 54 aa, Homo sapiens
PEPPESWSGVRDGTTHPAMCLQDLTAVESEFLSQFNMTFPSSPPPSPCLLSSLV

SEQ ID NO: 818 - protein, 46 aa, Homo sapiens
  SITE (10): Xaa equals any of the naturally occurring L-amino acids
  SITE (24): Xaa equals any of the naturally occurring L-amino acids
  SITE (27): Xaa equals any of the naturally occurring L-amino acids
  SITE (33): Xaa equals any of the naturally occurring L-amino acids
  SITE (37): Xaa equals any of the naturally occurring L-amino acids
  SITE (38): Xaa equals any of the naturally occurring L-amino acids
  SITE (45): Xaa equals any of the naturally occurring L-amino acids
AMISIGFLGXIVRAHHIFTVGIDXDTXAYFTCXTIIXXIPKRGQXN

SEQ ID NO: 819 - protein, 118 aa, Homo sapiens
  SITE (37): Xaa equals any of the naturally occurring L-amino acids
  SITE (38): Xaa equals any of the naturally occurring L-amino acids
  SITE (45): Xaa equals any of the naturally occurring L-amino acids
  SITE (69): Xaa equals any of the naturally occurring L-amino acids
  SITE (75): Xaa equals any of the naturally occurring L-amino acids
  SITE (108): Xaa equals any of the naturally occurring L-amino acids
KLPLKAKMGKEKTHINIVVIGHVDSGKSTTTGHLTYXXGGIDKRXIEKFEKEAAEMGKGSFKYAWVLDXLKAERXRGITIDISLWKFETSKYYVTIIDAPGHRDFIKXMITGTSQADC

SEQ ID NO: 820 - protein, 80 aa, Homo sapiens
  SITE (30): Xaa equals any of the naturally occurring L-amino acids
ILGFFEIITVCFPFVAGNFWGRTLLLSSVXQTQPVTMVLDHLCRDSTSFPIMICPHWRYFTSVIVLSSLGIEIKAVEYMN

SEQ ID NO: 821 - protein, 100 aa, Homo sapiens
  SITE (19): Xaa equals any of the naturally occurring L-amino acids
  SITE (46): Xaa equals any of the naturally occurring L-amino acids
  SITE (56): Xaa equals any of the naturally occurring L-amino acids
  SITE (64): Xaa equals any of the naturally occurring L-amino acids
  SITE (70): Xaa equals any of the naturally occurring L-amino acids
  SITE (81): Xaa equals any of the naturally occurring L-amino acids
  SITE (82): Xaa equals any of the naturally occurring L-amino acids
  SITE (98): Xaa equals any of the naturally occurring L-amino acids
  SITE (99): Xaa equals any of the naturally occurring L-amino acids
TIQKGTKAWSIHRGGGRSXTSGSPGLQEFGTSAGPEMQTGRNNFVXRRNPADPQRXPSNPSHRXQCAAGXEQSEHNVCQDXXECTAGTHNCRADQVCXXL

SEQ ID NO: 822 - protein, 163 aa, Homo sapiens
  SITE (1): Xaa equals any of the naturally occurring L-amino acids
  SITE (3): Xaa equals any of the naturally occurring L-amino acids
  SITE (5): Xaa equals any of the naturally occurring L-amino acids
  SITE (12): Xaa equals any of the naturally occurring L-amino acids
  SITE (35): Xaa equals any of the naturally occurring L-amino acids
  SITE (38): Xaa equals any of the naturally occurring L-amino acids
  SITE (43): Xaa equals any of the naturally occurring L-amino acids
  SITE (69): Xaa equals any of the naturally occurring L-amino acids
  SITE (78): Xaa equals any of the naturally occurring L-amino acids
  SITE (95): Xaa equals any of the naturally occurring L-amino acids
  SITE (96): Xaa equals any of the naturally occurring L-amino acids
  SITE (106): Xaa equals any of the naturally occurring L-amino acids
  SITE (115): Xaa equals any of the naturally occurring L-amino acids
  SITE (117): Xaa equals any of the naturally occurring L-amino acids
  SITE (142): Xaa equals any of the naturally occurring L-amino acids
  SITE (144): Xaa equals any of the naturally occurring L-amino acids
  SITE (153): Xaa equals any of the naturally occurring L-amino acids
  SITE (154): Xaa equals any of the naturally occurring L-amino acids
  SITE (155): Xaa equals any of the naturally occurring L-amino acids
XQXCXDGTNPGXLFQPPTDPPISSPLATSGTIFSXISXFWDLXPPFLWLAPSCQPTMSSQIRQNYSTDXEATVNSLVXLYLHASYTYLSLGFYFXXDDLALESVSXFFHETGRGXRXGYERLLNMQNQRGRPRSLPGSQQAXLXIIGVKTPKXXXTCHCPENK

SEQ ID NO: 823 - protein, 62 aa, Homo sapiens
  SITE (1): Xaa equals any of the naturally occurring L-amino acids
  SITE (5): Xaa equals any of the naturally occurring L-amino acids
  SITE (18): Xaa equals any of the naturally occurring L-amino acids
  SITE (21): Xaa equals any of the naturally occurring L-amino acids
  SITE (29): Xaa equals any of the naturally occurring L-amino acids
  SITE (35): Xaa equals any of the naturally occurring L-amino acids
  SITE (36): Xaa equals any of the naturally occurring L-amino acids
  SITE (46): Xaa equals any of the naturally occurring L-amino acids
XGTSXSKASTPNGYDNGXIWXTWKTRWYXMKKTTXXIIPFNRLTIXEGQQHHLGGAKQAGDV

SEQ ID NO: 824 - protein, 53 aa, Homo sapiens
  SITE (16): Xaa equals any of the naturally occurring L-amino acids
  SITE (46): Xaa equals any of the naturally occurring L-amino acids
  SITE (47): Xaa equals any of the naturally occurring L-amino acids
  SITE (52): Xaa equals any of the naturally occurring L-amino acids
  SITE (53): Xaa equals any of the naturally occurring L-amino acids
EEINLAPDSSSVVVSXLMVATKYEVSVYALKDTLTSRPAQGVVTTXXNVSPXX

SEQ ID NO: 825 - protein, 26 aa, Homo sapiens
SRFTDDDKTDHLSWEWNLTIKKDWKD

SEQ ID NO: 826 - protein, 102 aa, Homo sapiens
  SITE (49): Xaa equals any of the naturally occurring L-amino acids
RSVRALLCTLRAVPLPAAPCPPRPWQLGVGAVRTLRTGPALLSVRKFTXKHEWVNNRKWHWNSGNPAILHRKRWEILFIVISLKFGTKFETNKLILGCFWRV

SEQ ID NO: 827 - protein, 140 aa, Homo sapiens
  SITE (96): Xaa equals any of the naturally occurring L-amino acids
  SITE (128): Xaa equals any of the naturally occurring L-amino acids
  SITE (131): Xaa equals any of the naturally occurring L-amino acids
  SITE (135): Xaa equals any of the naturally occurring L-amino acids
PHSRALLTPNRAPKKKMAISGVPVLGFFIIAVLMSAQESWAIKEEHVIIQAEFYLNPDQSGEFMFDFDGDEIFHVDMAKKETVWRLEEFGRFASFXAQGALANIAVDKANLEIMTKRSNYTPITNVPXEVXCAHXQPCGT

SEQ ID NO: 828 - protein, 88 aa, Homo sapiens
  SITE (2): Xaa equals any of the naturally occurring L-amino acids
RXDENKVDGMNAPKGQTGNSSRGPGDGGNRDHWKESDRKDGKKDQDSRSAPEPKKPEENPASKFSSASKYAALSVDGEDENEGEDYAE

SEQ ID NO: 829 - protein, 217 aa, Homo sapiens
  SITE (137): Xaa equals any of the naturally occurring L-amino acids
  SITE (168): Xaa equals any of the naturally occurring L-amino acids
  SITE (170): Xaa equals any of the naturally occurring L-amino acids
  SITE (176): Xaa equals any of the naturally occurring L-amino acids
  SITE (183): Xaa equals any of the naturally occurring L-amino acids
  SITE (185): Xaa equals any of the naturally occurring L-amino acids
  SITE (190): Xaa equals any of the naturally occurring L-amino acids
  SITE (196): Xaa equals any of the naturally occurring L-amino acids
  SITE (206): Xaa equals any of the naturally occurring L-amino acids
  SITE (210): Xaa equals any of the naturally occurring L-amino acids
ILPGYIDFTADQVDLTSALTKKITLKTPLVSSPMDTVTEAGMAIAMALTGGIGFIHHNCTPEFQANEVRKVKKYEQGFITDPVVLSPKDRVRDVFEAKARHGFCGIPITDTGRMGSRLVGIISSRDIDFLKEEEHDXFLEEIMTKREDLVVAPAGITLKEANEILQRXKXGKVPIXNEMMSLXAXWPDRXEEESGXPLASKMPEQXWVGXHGTMGAS

SEQ ID NO: 830 - protein, 103 aa, Homo sapiens
  SITE (5): Xaa equals any of the naturally occurring L-amino acids
  SITE (8): Xaa equals any of the naturally occurring L-amino acids
  SITE (9): Xaa equals any of the naturally occurring L-amino acids
  SITE (63): Xaa equals any of the naturally occurring L-amino acids
  SITE (67): Xaa equals any of the naturally occurring L-amino acids
  SITE (97): Xaa equals any of the naturally occurring L-amino acids
  SITE (102): Xaa equals any of the naturally occurring L-amino acids
WKFPXDTXXRYACRYRSGIPGSTHASAHASGAAETPPAWHLGAQRSPDTAAAAMESETEPEPXTLLXKSPNQRHRDLELSGDRGWSVGHLKAHLSRXYPERXR

SEQ ID NO: 831 - protein, 81 aa, Homo sapiens
  SITE (60): Xaa equals any of the naturally occurring L-amino acids
NPSSSYRSARVGGMSVACVLKRKAVLWQDSFSPHLKHHPQEPANPNMPVVLTSGTGSQAXHNQLQIRLLQLGLTPALSQDL

SEQ ID NO: 832 - protein, 94 aa, Homo sapiens
KRSLMTRGLSLALAVVLQRRDWENPGVTQLNRLAAHPPFASWRNSEEARTDRPSQQLRSLNGEWRLMRYFLLTHLCGISHRIWCTLSTICSDAA

SEQ ID NO: 833 - protein, 77 aa, Homo sapiens
GDRGPGLCLHRQVPEHLGPDFGHLHDHSAHHHPSVGRPGPAIDQEASLRPGALPVTCIPRTLSSIPRPAPRGQELCP

SEQ ID NO: 834 - protein, 146 aa, Homo sapiens
FRFINARRRIVQPMIDQSNRAVSQGAAYSPEGQPMGSFVLDGQQHMGIRPAGLQSMPGDYVSQGGPMGMSMAQPSYTPPQMTPHPTQLRHGPPMHSYLPSHPHHPAMMMHGGPPTHPGMTMSAQSPTMLNSVDPNVGGQVMDIHAQ

SEQ ID NO: 835 - protein, 104 aa, Homo sapiens
  SITE (95): Xaa equals any of the naturally occurring L-amino acids
PISDHEATLRCWALGFYPAEITLTWQRDGEDQTQDTELVETRPAGDGTFQKWAAVVVPSGEEQRYTCHVQHEGLPKPLTLRWELSSQPTIPIVGXIAGLVLLGL

SEQ ID NO: 836 - protein, 50 aa, Homo sapiens
  SITE (43): Xaa equals any of the naturally occurring L-amino acids
  SITE (47): Xaa equals any of the naturally occurring L-amino acids
GGWTQRRLSPPGHSESAQSKMLSGIGGFVLGSSSSGWAYYPSXDQKXLLH

SEQ ID NO: 837 - protein, 62 aa, Homo sapiens
  SITE (1): Xaa equals any of the naturally occurring L-amino acids
  SITE (6): Xaa equals any of the naturally occurring L-amino acids
  SITE (25): Xaa equals any of the naturally occurring L-amino acids
  SITE (28): Xaa equals any of the naturally occurring L-amino acids
  SITE (46): Xaa equals any of the naturally occurring L-amino acids
  SITE (47): Xaa equals any of the naturally occurring L-amino acids
  SITE (49): Xaa equals any of the naturally occurring L-amino acids
  SITE (59): Xaa equals any of the naturally occurring L-amino acids
XRSSLXTINYNEFPTMVFPSGQISXGSXLAPAPPQVPAPGSSPCPXXQXWYQLWPRPQXLCP

SEQ ID NO: 838 - protein, 105 aa, Homo sapiens
  SITE (95): Xaa equals any of the naturally occurring L-amino acids
  SITE (100): Xaa equals any of the naturally occurring L-amino acids
  SITE (105): Xaa equals any of the naturally occurring L-amino acids
HELTAKYLNYYRGMLDVAHEQVDFKDFYPAIAVNDVRQAARSAASYMLFDPKDSVMQQNLVYYRFHRARWGLEEEDFQPREEAMLYHNQTAELRXCWSSXTCTCX

SEQ ID NO: 839 - protein, 49 aa, Homo sapiens
PDRPWAKPEDPSLLEDPRIKAIAAKHNKTTAQVLIRFPMQRNGGGSPSL

SEQ ID NO: 840 - protein, 100 aa, Homo sapiens
  SITE (42): Xaa equals any of the naturally occurring L-amino acids
  SITE (53): Xaa equals any of the naturally occurring L-amino acids
  SITE (95): Xaa equals any of the naturally occurring L-amino acids
  SITE (96): Xaa equals any of the naturally occurring L-amino acids
SKGIRDNERSGRARVHVSEEGTEPEAMLQVLGPKPALPAGTXDTAKEDAANRXLAKLYKVSNGAWTMSVSLLADENPSAKGPEIQKTASSWTTQXXKSLS

SEQ ID NO: 841 - protein, 85 aa, Homo sapiens
  SITE (64): Xaa equals any of the naturally occurring L-amino acids
GNGGRDFVRRDLAIRDTFVNASRTLYSSSPRVLSNNSDANLELINTWVAKNTNNKISRLLDSLXSDTRLVLLNAILPECQVEDNI

SEQ ID NO: 842 - protein, 81 aa, Homo sapiens
  SITE (1): Xaa equals any of the naturally occurring L-amino acids
  SITE (10): Xaa equals any of the naturally occurring L-amino acids
  SITE (14): Xaa equals any of the naturally occurring L-amino acids
  SITE (17): Xaa equals any of the naturally occurring L-amino acids
  SITE (22): Xaa equals any of the naturally occurring L-amino acids
  SITE (33): Xaa equals any of the naturally occurring L-amino acids
  SITE (38): Xaa equals any of the naturally occurring L-amino acids
  SITE (42): Xaa equals any of the naturally occurring L-amino acids
  SITE (50): Xaa equals any of the naturally occurring L-amino acids
  SITE (63): Xaa equals any of the naturally occurring L-amino acids
  SITE (74): Xaa equals any of the naturally occurring L-amino acids
  SITE (77): Xaa equals any of the naturally occurring L-amino acids
XTNMAFSPFXIASXLTXVLLGXGDNTKTNLESXLSYPXDFTXVHQALKGXTTKGVTSVSQIFXCPELAIRDPLXNAXRTLF

SEQ ID NO: 843 - protein, 121 aa, Homo sapiens
  SITE (97): Xaa equals any of the naturally occurring L-amino acids
  SITE (98): Xaa equals any of the naturally occurring L-amino acids
  SITE (111): Xaa equals any of the naturally occurring L-amino acids
  SITE (117): Xaa equals any of the naturally occurring L-amino acids
GTSKAQDGTFSSVLTLTNLTGLDTGEYFCTHNDSRGLETDERKRLYIFVPEATSAKPPLGTGRWILMPTMSTDSRVSPLSGLMLSRVFIHQRLCGTXXGLWSARWRTSPSXALWIGXEVSI

SEQ ID NO: 844 - protein, 136 aa, Homo sapiens
  SITE (1): Xaa equals any of the naturally occurring L-amino acids
  SITE (12): Xaa equals any of the naturally occurring L-amino acids
  SITE (127): Xaa equals any of the naturally occurring L-amino acids
  SITE (131): Xaa equals any of the naturally occurring L-amino acids
  SITE (135): Xaa equals any of the naturally occurring L-amino acids
XRAGLGPGPWAXPHSPWRSWRPLQSPKGLGRSWAVRVSRCPMTKTFAASGQTGYLIQSTGPKSCVITYLAQVDPKGSLPKWVVNKSSQFLAPKAMKKMYKACLKYPEWKQKHLPHFKPWLHPEQSPXPSLXLRSXR

SEQ ID NO: 845 - protein, 145 aa, Homo sapiens
PKQLEALCVGAATGPRAMWLCPLALNLILMAASGAVCEVKDVCVGSPGIPGTPGSHGLPGRDGRDGVKGDPGPPGPMGPPGEMPCPPGNDGLPGAPGIPGECGEKGEPGERGPPGLPAHLDEELQATLHDFRHQILQTRGALSLQ

SEQ ID NO: 846 - protein, 61 aa, Homo sapiens
  SITE (42): Xaa equals any of the naturally occurring L-amino acids
  SITE (45): Xaa equals any of the naturally occurring L-amino acids
  SITE (48): Xaa equals any of the naturally occurring L-amino acids
  SITE (55): Xaa equals any of the naturally occurring L-amino acids
KLPLKAKMGKEKTHINIVVIGHVNSGKSTTTGHLIYICGGFXKKXFEXFEKEAAXMGKGSS

SEQ ID NO: 847 - protein, 74 aa, Homo sapiens
  SITE (72): Xaa equals any of the naturally occurring L-amino acids
VQPALAHRAVRDLRAACRQGICQRLRSPEPPELQHHVIWDLPGRGGGGGFLRPPHLMPTPCPARHGRGLEAXEK

SEQ ID NO: 848 - protein, 40 aa, Homo sapiens
  SITE (2): Xaa equals any of the naturally occurring L-amino acids
  SITE (3): Xaa equals any of the naturally occurring L-amino acids
  SITE (4): Xaa equals any of the naturally occurring L-amino acids
LXXXEAAMFHRKLFEELVRASSHSTDLMEAMAMGSVEASY

SEQ ID NO: 849 - protein, 125 aa, Homo sapiens
  SITE (113): Xaa equals any of the naturally occurring L-amino acids
  SITE (116): Xaa equals any of the naturally occurring L-amino acids
  SITE (118): Xaa equals any of the naturally occurring L-amino acids
  SITE (125): Xaa equals any of the naturally occurring L-amino acids
EELQVDFLDHVPLTTHNFARKTFLKLAFCDICQKFLLNGFRCQTCGYKFHEHCSTKVPTMCVDWSNIRQLLLFPNSTIGDSGVPALPSLTMRRMRESVPRMPVSSQHRYSTPXAFXFXTSSPSSX

SEQ ID NO: 850 - protein, 52 aa, Homo sapiens
  SITE (18): Xaa equals any of the naturally occurring L-amino acids
  SITE (24): Xaa equals any of the naturally occurring L-amino acids
  SITE (44): Xaa equals any of the naturally occurring L-amino acids
  SITE (49): Xaa equals any of the naturally occurring L-amino acids
PDRRRAAIMDTSRVQPIXLARVTXVLGRTGSQGQCTQVIGWGHXADCRXPKP

SEQ ID NO: 851 - protein, 108 aa, Homo sapiens
  SITE (71): Xaa equals any of the naturally occurring L-amino acids
  SITE (89): Xaa equals any of the naturally occurring L-amino acids
  SITE (98): Xaa equals any of the naturally occurring L-amino acids
PTRPLPAPPLVSSKMASGGSGGVSVPALWSEVNRYGQNGDFTRALKTVNKILQINKDDVTALHCKVVCLIXNGSFKEALNVINTHTKVXANNSLSFEXAYCEYRLKQN

SEQ ID NO: 852 - protein, 102 aa, Homo sapiens
  SITE (74): Xaa equals any of the naturally occurring L-amino acids
  SITE (82): Xaa equals any of the naturally occurring L-amino acids
  SITE (83): Xaa equals any of the naturally occurring L-amino acids
  SITE (86): Xaa equals any of the naturally occurring L-amino acids
  SITE (91): Xaa equals any of the naturally occurring L-amino acids
  SITE (97): Xaa equals any of the naturally occurring L-amino acids
SWRLCVWVADFLEPEKKVTGHMRDRWSESVTGAATGPRAMWLCPLALNLILMAASGAACEVKDVCVGSPGIPGXPGSHGLPXXEGXNGVKXDPGPPXPMGPP

SEQ ID NO: 853 - protein, 49 aa, Homo sapiens
NLMGRYGDNNHSQGVNWFHWKGHEHSIQFAEMKLRPSNFRNLEGRRKRA

SEQ ID NO: 854 - protein, 130 aa, Homo sapiens
  SITE (66): Xaa equals any of the naturally occurring L-amino acids
  SITE (70): Xaa equals any of the naturally occurring L-amino acids
  SITE (73): Xaa equals any of the naturally occurring L-amino acids
  SITE (118): Xaa equals any of the naturally occurring L-amino acids
  SITE (128): Xaa equals any of the naturally occurring L-amino acids
  SITE (129): Xaa equals any of the naturally occurring L-amino acids
  SITE (130): Xaa equals any of the naturally occurring L-amino acids
LSAMRFLAATFLLLALSTAAQAEPVQFKDCGSVDGVIKEVNVSPCPTQPCQLSKGQSYSVNVTFTXNIQXKSXKAVVHGILMGVPVPFPIPEPDGCKSGINCPIQKDKTYSYLNKLPXKSEYPSIKLXXX

SEQ ID NO: 855 - protein, 173 aa, Homo sapiens
  SITE (159): Xaa equals any of the naturally occurring L-amino acids
  SITE (168): Xaa equals any of the naturally occurring L-amino acids
FIFTKWLQDVFNVPLVIQMTDDEKYLWKDLTLDQAYSYAVENAKDIIACGFDINKTFIFSDLDYMGMSSGFYKNVVKIQKHVTFNQVKGIFGFTDSDCIGKISFPAIQAAPSFSNSFPQIFRDRTDIQCLIPCAIDQDPYFRMTRDVAPRIGYPKPALXTPPSSQPCXAPRPK

SEQ ID NO: 856 - protein, 139 aa, Homo sapiens
  SITE (22): Xaa equals any of the naturally occurring L-amino acids
  SITE (40): Xaa equals any of the naturally occurring L-amino acids
  SITE (79): Xaa equals any of the naturally occurring L-amino acids
  SITE (83): Xaa equals any of the naturally occurring L-amino acids
  SITE (84): Xaa equals any of the naturally occurring L-amino acids
  SITE (88): Xaa equals any of the naturally occurring L-amino acids
  SITE (92): Xaa equals any of the naturally occurring L-amino acids
  SITE (96): Xaa equals any of the naturally occurring L-amino acids
  SITE (99): Xaa equals any of the naturally occurring L-amino acids
  SITE (108): Xaa equals any of the naturally occurring L-amino acids
  SITE (120): Xaa equals any of the naturally occurring L-amino acids
  SITE (125): Xaa equals any of the naturally occurring L-amino acids
  SITE (137): Xaa equals any of the naturally occurring L-amino acids
AHCLQESREFQGKVRSQDPREXGGTHRLPGHGGRPHLRPXLLPPGATASALQLMMRTRIAAQVSRFAAILLGLGVHAMXFSNXXPGLXLKSXQKWXPKXREQTMGPTXGFIPSFLLKGPXFVGEXIEPLCNVNENFXKI

SEQ ID NO: 857 - protein, 30 aa, Homo sapiens
  SITE (3): Xaa equals any of the naturally occurring L-amino acids
  SITE (4): Xaa equals any of the naturally occurring L-amino acids
  SITE (22): Xaa equals any of the naturally occurring L-amino acids
  SITE (27): Xaa equals any of the naturally occurring L-amino acids
  SITE (30): Xaa equals any of the naturally occurring L-amino acids
LVXXSFFFFFFFFFFFFFFKKXKKKKXGKX

SEQ ID NO: 858 - protein, 58 aa, Homo sapiens
  SITE (7): Xaa equals any of the naturally occurring L-amino acids
  SITE (17): Xaa equals any of the naturally occurring L-amino acids
  SITE (19): Xaa equals any of the naturally occurring L-amino acids
  SITE (42): Xaa equals any of the naturally occurring L-amino acids
  SITE (48): Xaa equals any of the naturally occurring L-amino acids
  SITE (50): Xaa equals any of the naturally occurring L-amino acids
  SITE (51): Xaa equals any of the naturally occurring L-amino acids
  SITE (52): Xaa equals any of the naturally occurring L-amino acids
CWNQCFXHVFNSLVYGXPXQMYLNKQKPFKKKKKNPGGGARXPIPPKXGXXXHSRAGV

SEQ ID NO: 859 - protein, 69 aa, Homo sapiens
  SITE (1): Xaa equals any of the naturally occurring L-amino acids
  SITE (2): Xaa equals any of the naturally occurring L-amino acids
  SITE (3): Xaa equals any of the naturally occurring L-amino acids
  SITE (4): Xaa equals any of the naturally occurring L-amino acids
  SITE (5): Xaa equals any of the naturally occurring L-amino acids
  SITE (9): Xaa equals any of the naturally occurring L-amino acids
  SITE (10): Xaa equals any of the naturally occurring L-amino acids
  SITE (12): Xaa equals any of the naturally occurring L-amino acids
  SITE (13): Xaa equals any of the naturally occurring L-amino acids
  SITE (18): Xaa equals any of the naturally occurring L-amino acids
  SITE (20): Xaa equals any of the naturally occurring L-amino acids
  SITE (32): Xaa equals any of the naturally occurring L-amino acids
  SITE (35): Xaa equals any of the naturally occurring L-amino acids
  SITE (41): Xaa equals any of the naturally occurring L-amino acids
  SITE (52): Xaa equals any of the naturally occurring L-amino acids
XXXXXNPNXXPXXGMLIXEXVKKVKGNSGKSXPAXLPKTSXLASPVLEAPAXPVDTCLTGRGYPNRGKG

SEQ ID NO: 860 - protein, 48 aa, Homo sapiens
  SITE (1): Xaa equals any of the naturally occurring L-amino acids
  SITE (11): Xaa equals any of the naturally occurring L-amino acids
  SITE (28): Xaa equals any of the naturally occurring L-amino acids
  SITE (35): Xaa equals any of the naturally occurring L-amino acids
  SITE (37): Xaa equals any of the naturally occurring L-amino acids
  SITE (41): Xaa equals any of the naturally occurring L-amino acids
  SITE (47): Xaa equals any of the naturally occurring L-amino acids
XALGNRFGAGXGRRLWFWKVVPVVDLVXAGGVVVXLXLVAXCVLEVXS

SEQ ID NO: 861 - protein, 60 aa, Homo sapiens
  SITE (13): Xaa equals any of the naturally occurring L-amino acids
  SITE (23): Xaa equals any of the naturally occurring L-amino acids
  SITE (25): Xaa equals any of the naturally occurring L-amino acids
  SITE (35): Xaa equals any of the naturally occurring L-amino acids
  SITE (48): Xaa equals any of the naturally occurring L-amino acids
  SITE (53): Xaa equals any of the naturally occurring L-amino acids
  SITE (54): Xaa equals any of the naturally occurring L-amino acids
  SITE (55): Xaa equals any of the naturally occurring L-amino acids
  SITE (56): Xaa equals any of the naturally occurring L-amino acids
DILQLWDWCLTVXYCHVNVVYDXKXYVTKDFYSDXFIIKGHMRLVETXFVVKXXXXNFCT

SEQ ID NO: 862 - protein, 54 aa, Homo sapiens
  SITE (31): Xaa equals any of the naturally occurring L-amino acids
  SITE (40): Xaa equals any of the naturally occurring L-amino acids
DGALLIPHQDEQSWPSIMTERGRLRGSPDCXELRTQWRFXGTLRSLWQAWSGSP

SEQ ID NO: 863 - protein, 63 aa, Homo sapiens
  SITE (12): Xaa equals any of the naturally occurring L-amino acids
  SITE (23): Xaa equals any of the naturally occurring L-amino acids
  SITE (30): Xaa equals any of the naturally occurring L-amino acids
  SITE (32): Xaa equals any of the naturally occurring L-amino acids
  SITE (33): Xaa equals any of the naturally occurring L-amino acids
  SITE (41): Xaa equals any of the naturally occurring L-amino acids
  SITE (45): Xaa equals any of the naturally occurring L-amino acids
  SITE (56): Xaa equals any of the naturally occurring L-amino acids
  SITE (58): Xaa equals any of the naturally occurring L-amino acids
PWLRHEMEPLIXIWSSSLITDGXIRVWVEXLXXKKGCFWSXVFFXTSALGGIWQIXRXRFGEL

SEQ ID NO: 864 - protein, 78 aa, Homo sapiens
  SITE (3): Xaa equals any of the naturally occurring L-amino acids
  SITE (4): Xaa equals any of the naturally occurring L-amino acids
  SITE (11): Xaa equals any of the naturally occurring L-amino acids
  SITE (14): Xaa equals any of the naturally occurring L-amino acids
  SITE (16): Xaa equals any of the naturally occurring L-amino acids
  SITE (18): Xaa equals any of the naturally occurring L-amino acids
  SITE (27): Xaa equals any of the naturally occurring L-amino acids
  SITE (29): Xaa equals any of the naturally occurring L-amino acids
  SITE (30): Xaa equals any of the naturally occurring L-amino acids
  SITE (34): Xaa equals any of the naturally occurring L-amino acids
  SITE (35): Xaa equals any of the naturally occurring L-amino acids
  SITE (44): Xaa equals any of the naturally occurring L-amino acids
  SITE (46): Xaa equals any of the naturally occurring L-amino acids
  SITE (49): Xaa equals any of the naturally occurring L-amino acids
  SITE (51): Xaa equals any of the naturally occurring L-amino acids
  SITE (58): Xaa equals any of the naturally occurring L-amino acids
  SITE (59): Xaa equals any of the naturally occurring L-amino acids
  SITE (64): Xaa equals any of the naturally occurring L-amino acids
  SITE (68): Xaa equals any of the naturally occurring L-amino acids
IRXXQRPKQLXGRXCXSXDFLEPEKKXEXXLVPXXMWLCPAGPXTXSCXGXFWCCVRXXGTFGXGSPXIPGTPGSHGL

SEQ ID NO: 865 - protein, 67 aa, Homo sapiens
  SITE (20): Xaa equals any of the naturally occurring L-amino acids
  SITE (21): Xaa equals any of the naturally occurring L-amino acids
  SITE (30): Xaa equals any of the naturally occurring L-amino acids
  SITE (31): Xaa equals any of the naturally occurring L-amino acids
  SITE (37): Xaa equals any of the naturally occurring L-amino acids
  SITE (45): Xaa equals any of the naturally occurring L-amino acids
  SITE (50): Xaa equals any of the naturally occurring L-amino acids
  SITE (51): Xaa equals any of the naturally occurring L-amino acids
  SITE (54): Xaa equals any of the naturally occurring L-amino acids
  SITE (57): Xaa equals any of the naturally occurring L-amino acids
  SITE (61): Xaa equals any of the naturally occurring L-amino acids
  SITE (62): Xaa equals any of the naturally occurring L-amino acids
SIDLVDNTPSPPLRRCFVIXXPPTPRAEPXXPFEEGXLVILLCGXWRNVXXVKXASXLGPXXIGLVK

SEQ ID NO: 866 - protein, 79 aa, Homo sapiens
  SITE (13): Xaa equals any of the naturally occurring L-amino acids
IYAVVATNRPMIXLAGQVFSRAKSPSGPLAGKASRSALSCQTSGRIPGRQKPLHLLCRTLHFPNPPQVGRAEGASASLD

SEQ ID NO: 867 - protein, 116 aa, Homo sapiens
  SITE (65): Xaa equals any of the naturally occurring L-amino acids
  SITE (77): Xaa equals any of the naturally occurring L-amino acids
  SITE (82): Xaa equals any of the naturally occurring L-amino acids
  SITE (84): Xaa equals any of the naturally occurring L-amino acids
  SITE (92): Xaa equals any of the naturally occurring L-amino acids
  SITE (99): Xaa equals any of the naturally occurring L-amino acids
  SITE (104): Xaa equals any of the naturally occurring L-amino acids
  SITE (106): Xaa equals any of the naturally occurring L-amino acids
  SITE (110): Xaa equals any of the naturally occurring L-amino acids
TGTSLMCPCPSDDSWGSGGGESPRTRAVAFPQLLRLPAFPAETARPVGWRGRPGLQTTSAITWLXVPKQDIHTVPLXPSSSXKXKGKAKLKXLLGPWLXSFFPXPXALPXARLKKT

SEQ ID NO: 868 - protein, 57 aa, Homo sapiens
  SITE (30): Xaa equals any of the naturally occurring L-amino acids
  SITE (35): Xaa equals any of the naturally occurring L-amino acids
  SITE (41): Xaa equals any of the naturally occurring L-amino acids
  SITE (47): Xaa equals any of the naturally occurring L-amino acids
PSFLKPRCVPQLQRVGMGITLNCGKAEWKXQFHRXKQLLGXYSVPRXRENFLGKYFV

SEQ ID NO: 869 - protein, 40 aa, Homo sapiens
  SITE (30): Xaa equals any of the naturally occurring L-amino acids
  SITE (34): Xaa equals any of the naturally occurring L-amino acids
PLYLLHNELTRNNFARRAKAKTPETRRATXETAXRAHPSM

SEQ ID NO: 870 - protein, 38 aa, Homo sapiens
  SITE (6): Xaa equals any of the naturally occurring L-amino acids
  SITE (16): Xaa equals any of the naturally occurring L-amino acids
  SITE (20): Xaa equals any of the naturally occurring L-amino acids
  SITE (21): Xaa equals any of the naturally occurring L-amino acids
  SITE (23): Xaa equals any of the naturally occurring L-amino acids
VNVTYXQFSLFEYRMXTLHXXIXRAWGILPMNFLQAHL

SEQ ID NO: 871 - protein, 95 aa, Homo sapiens
  SITE (83): Xaa equals any of the naturally occurring L-amino acids
AKLFGKVLPTAPVRVILAPLRKGVRVSVPPATPPAFPSLPISLPQGPELPPDWRASPAQPRHRPPSGPPVARFPGFIPQPLLXPFIPISYCYCCE

SEQ ID NO: 872 - protein, 30 aa, Homo sapiens
  SITE (8): Xaa equals any of the naturally occurring L-amino acids
  SITE (25): Xaa equals any of the naturally occurring L-amino acids
  SITE (26): Xaa equals any of the naturally occurring L-amino acids
AQWQCSEXRFSPPVSAVTALGFSRXXFLIL

SEQ ID NO: 873 - protein, 76 aa, Homo sapiens
TKILQIVPHEYPPSSAILQSGNRWVEAAQVNYPACLSIHSSSSSQRLKAGPFQSSQPVLHLVPPDPGMEALSPTVW

SEQ ID NO: 874 - protein, 61 aa, Homo sapiens
  SITE (23): Xaa equals any of the naturally occurring L-amino acids
  SITE (26): Xaa equals any of the naturally occurring L-amino acids
  SITE (30): Xaa equals any of the naturally occurring L-amino acids
  SITE (40): Xaa equals any of the naturally occurring L-amino acids
  SITE (44): Xaa equals any of the naturally occurring L-amino acids
  SITE (53): Xaa equals any of the naturally occurring L-amino acids
  SITE (60): Xaa equals any of the naturally occurring L-amino acids
RTLFKTGSSIGWSNKDSLQVQFXGPXGKLXTNHNGLIKRXTIIXLQRLLYRGXILYLPQXS

SEQ ID NO: 875 - protein, 77 aa, Homo sapiens
  SITE (67): Xaa equals any of the naturally occurring L-amino acids
  SITE (70): Xaa equals any of the naturally occurring L-amino acids
  SITE (77): Xaa equals any of the naturally occurring L-amino acids
KLHLQIFLPMNNVVDSVHSFSLSLSLSHTHTHTHTHTHRHGTILPGALEHIPGGHRWSESLGGYLSXLGXPNVSWGX

SEQ ID NO: 876 - protein, 41 aa, Homo sapiens
  SITE (38): Xaa equals any of the naturally occurring L-amino acids
  SITE (40): Xaa equals any of the naturally occurring L-amino acids
  SITE (41): Xaa equals any of the naturally occurring L-amino acids
LVPNSARGEREREREREREREREREREREREREREREXGXX

SEQ ID NO: 877 - protein, 45 aa, Homo sapiens
  SITE (11): Xaa equals any of the naturally occurring L-amino acids
  SITE (20): Xaa equals any of the naturally occurring L-amino acids
  SITE (25): Xaa equals any of the naturally occurring L-amino acids
  SITE (35): Xaa equals any of the naturally occurring L-amino acids
  SITE (45): Xaa equals any of the naturally occurring L-amino acids
LDLLYRDMVQXGLLKFIEHXNYETXTFYISEDMGXNLWKIQVAGX

SEQ ID NO: 878 - protein, 107 aa, Homo sapiens
  SITE (69): Xaa equals any of the naturally occurring L-amino acids
  SITE (83): Xaa equals any of the naturally occurring L-amino acids
  SITE (90): Xaa equals any of the naturally occurring L-amino acids
  SITE (97): Xaa equals any of the naturally occurring L-amino acids
RGPRARDAAALPPPTPTAPSFASSPGASPRHRRRPGHRHPPQPCPPGPCPRPPTAGCSAARAPRAGRAXRELRDYVTRTYSLXSALSPNXSRTSTLXPGRRVCHALL

SEQ ID NO: 879 - protein, 62 aa, Homo sapiens
  SITE (25): Xaa equals any of the naturally occurring L-amino acids
  SITE (55): Xaa equals any of the naturally occurring L-amino acids
ILTYIFTPNFTFSEIRISLVAQLTXNQESFKKMILKMAGKISFYCRQFLNWKFGXMHNKSCG

SEQ ID NO: 880 - protein, 25 aa, Homo sapiens
  SITE (9): Xaa equals any of the naturally occurring L-amino acids
  SITE (24): Xaa equals any of the naturally occurring L-amino acids
  SITE (25): Xaa equals any of the naturally occurring L-amino acids
GTRRERERXREREREREREREREXX

SEQ ID NO: 881 - protein, 71 aa, Homo sapiens
  SITE (24): Xaa equals any of the naturally occurring L-amino acids
  SITE (26): Xaa equals any of the naturally occurring L-amino acids
  SITE (54): Xaa equals any of the naturally occurring L-amino acids
  SITE (55): Xaa equals any of the naturally occurring L-amino acids
  SITE (59): Xaa equals any of the naturally occurring L-amino acids
  SITE (61): Xaa equals any of the naturally occurring L-amino acids
  SITE (64): Xaa equals any of the naturally occurring L-amino acids
  SITE (69): Xaa equals any of the naturally occurring L-amino acids
  SITE (70): Xaa equals any of the naturally occurring L-amino acids
RCAIDFFSSWLFNSPVSITVLPHXGXTERKLAFLFFLGPLPPRPLNFWNPKENXXGKTXFXGFXKNWEXXP

SEQ ID NO: 882 - protein, 127 aa, Homo sapiens
  SITE (32): Xaa equals any of the naturally occurring L-amino acids
  SITE (106): Xaa equals any of the naturally occurring L-amino acids
  SITE (119): Xaa equals any of the naturally occurring L-amino acids
  SITE (127): Xaa equals any of the naturally occurring L-amino acids
AQPRTGVDSPTSTSFLLCSQTMSGPPSSRARXPGGSSPTPTPVSAGTGSFLRAKVKDPLCEGSAEVGSHAPSRPLPALHSGRNLSFPCEKGQRVQASQVQREGPQXLLAAKHADPMDIXGKGSLPAX

SEQ ID NO: 883 - protein, 66 aa, Homo sapiens
  SITE (37): Xaa equals any of the naturally occurring L-amino acids
  SITE (60): Xaa equals any of the naturally occurring L-amino acids
  SITE (62): Xaa equals any of the naturally occurring L-amino acids
KMKPKMKYSTNKISTAKWKNTASKALCFKLGKSQQKXKEVCPMYFMKLRSGLMIKKEAWXFXRETT

SEQ ID NO: 884 - protein, 16 aa, Homo sapiens
  SITE (13): Xaa equals any of the naturally occurring L-amino acids
  SITE (16): Xaa equals any of the naturally occurring L-amino acids
GAMRGDRGLWSWXTLX

SEQ ID NO: 885 - protein, 37 aa, Homo sapiens
EQLKEHTRLCSKIVGRFIGRGDKPTEPGDSWLSKIES

SEQ ID NO: 886 - protein, 91 aa, Homo sapiens
RRGFPGYMYTDLATIYERAGRVEGRNGSITQIPILTMPNDDITHPIPDLTGYITEGQIYVDRQLHNRQIYPPINVLPSLSTVNEVCYWRRG

SEQ ID NO: 887 - DNA, 733 bp, Homo sapiens
gggatccggagcccaaatcttctgacaaaactcacacatgcccaccgtgcccagcacctgaattcgagggtgcaccgtcagtcttcctcttccccccaaaacccaaggacaccctcatgatctcccggactcctgaggtcacatgcgtggtggtggacgtaagccacgaagaccctgaggtcaagttcaactggtacgtggacggcgtggaggtgcataatgccaagacaaagccgcgggaggagcagtacaacagcacgtaccgtgtggtcagcgtcctcaccgtcctgcaccaggactggctgaatggcaaggagtacaagtgcaaggtctccaacaaagccctcccaacccccatcgagaaaaccatctccaaagccaaagggcagccccgagaaccacaggtgtacaccctgcccccatcccgggatgagctgaccaagaaccaggtcagcctgacctgcctggtcaaaggcttctatccaagcgacatcgccgtggagtgggagagcaatgggcagccggagaacaactacaagaccacgcctcccgtgctggactccgacggctccttcttcctctacagcaagctcaccgtggacaagagcaggtggcagcaggggaacgtcttctcatgctccgtgatgcatgaggctctgcacaaccactacacgcagaagagcctctccctgtctccgggtaaatgagtgcgacggccgcgactctagaggat

SEQ ID NO: 888 - protein, 5 aa, Homo sapiens
  SITE (3): Xaa equals any of the naturally occurring L-amino acids
WSXWS

SEQ ID NO: 889 - DNA, 86 bp, Homo sapiens
gcgcctcgagatttccccgaaatctagatttccccgaaatgatttccccgaaatgatttccccgaaatatctgccatctcaattag

SEQ ID NO: 890 - DNA, 27 bp, Homo sapiens
gcggcaagctttttgcaaagcctaggc

SEQ ID NO: 891 - DNA, 271 bp, Homo sapiens
ctcgagatttccccgaaatctagatttccccgaaatgatttccccgaaatgatttccccgaaatatctgccatctcaattagtcagcaaccatagtcccgcccctaactccgcccatcccgcccctaactccgcccagttccgcccattctccgccccatggctgactaattttttttatttatgcagaggccgaggccgcctcggcctctgagctattccagaagtagtgaggaggcttttttggaggcctaggcttttgcaaaaagctt

SEQ ID NO: 892 - DNA, 32 bp, Homo sapiens
gcgctcgagggatgacagcgatagaaccccgg

SEQ ID NO: 893 - DNA, 31 bp, Homo sapiens
gcgaagcttcgcgactccccggatccgcctc

SEQ ID NO: 894 - DNA, 12 bp, Homo sapiens
ggggactttccc

SEQ ID NO: 895 - DNA, 73 bp, Homo sapiens
gcggcctcgaggggactttcccggggactttccggggactttccgggactttccatcctgccatctcaattag

SEQ ID NO: 896 - DNA, 256 bp, Homo sapiens
ctcgaggggactttcccggggactttccggggactttccgggactttccatctgccatctcaattagtcagcaaccatagtcccgcccctaactccgcccatcccgcccctaactccgcccagttccgcccattctccgccccatggctgactaattttttttatttatgcagaggccgaggccgcctcggcctctgagctattccagaagtagtgaggaggcttttttggaggcctaggcttttgcaaaaagctt

What is claimed is:

1. An isolated nucleic acid molecule comprising a polynucleotide having a nucleotide sequence at least 95% identical to a sequence selected from the group consisting of:
(a) a polynucleotide fragment of SEQ ID NO:X or a polynucleotide fragment of the cDNA sequence included in the related cDNA clone, which is hybridizable to SEQ ID NO:X;
(b) a polynucleotide encoding a polypeptide fragment of SEQ ID NO:Y or a polypeptide fragment encoded by the cDNA sequence included in the related cDNA clone, which is hybridizable to SEQ ID NO:X;
(c) a polynucleotide encoding a polypeptide fragment of a polypeptide encoded by SEQ ID NO:X or a polypeptide fragment encoded by the cDNA sequence included in the related cDNA clone, which is hybridizable to SEQ ID NO:X;
(d) a polynucleotide encoding a polypeptide domain of SEQ ID NO:Y or a polypeptide domain encoded by the cDNA sequence included in the related cDNA clone, which is hybridizable to SEQ ID NO:X;
(e) a polynucleotide encoding a polypeptide epitope of SEQ ID NO:Y or a polypeptide epitope encoded by the cDNA sequence included in the related cDNA clone, which is hybridizable to SEQ ID NO:X;
(f) a polynucleotide encoding a polypeptide of SEQ ID NO:Y or the cDNA sequence included in the related cDNA clone, which is hybridizable to SEQ ID NO:X, having biological activity;
(g) a polynucleotide which is a variant of SEQ ID NO:X;
(h) a polynucleotide which is an allelic variant of SEQ ID NO:X;
(i) a polynucleotide which encodes a species homologue of the SEQ ID NO:Y;
(j) a polynucleotide capable of hybridizing under stringent conditions to any one of the polynucleotides specified in (a)-(i), wherein said polynucleotide does not hybridize under stringent conditions to a nucleic acid molecule having a nucleotide sequence of only A residues or of only T residues.

2. The isolated nucleic acid molecule of claim 1, wherein the polynucleotide fragment comprises a nucleotide sequence encoding a protein.

3. The isolated nucleic acid molecule of claim 1, wherein the polynucleotide fragment comprises a nucleotide sequence encoding the sequence identified as SEQ ID NO:Y or the polypeptide encoded by the cDNA sequence included in the related cDNA clone, which is hybridizable to SEQ ID NO:X.

4. The isolated nucleic acid molecule of claim 1, wherein the polynucleotide fragment comprises the entire nucleotide sequence of SEQ ID NO:X or the cDNA sequence included in the related cDNA clone, which is hybridizable to SEQ ID NO:X.

5. The isolated nucleic acid molecule of claim 2, wherein the nucleotide sequence comprises sequential nucleotide deletions from either the C-terminus or the N- terminus.

6. The isolated nucleic acid molecule of claim 3, wherein the nucleotide sequence comprises sequential nucleotide deletions from either the C-terminus or the N- terminus.

7. A recombinant vector comprising the isolated nucleic acid molecule of claim 1.

8. A method of making a recombinant host cell comprising the isolated nucleic acid molecule of claim 1.

9. A recombinant host cell produced by the method of claim 8.

10. The recombinant host cell of claim 9 comprising vector sequences.

11. An isolated polypeptide comprising an amino acid sequence at least 95% identical to a sequence se lected from the group cons isting of:
(a) a polypeptide fragment of SEQ ID NO:Y or of the sequence encoded by the cDNA included in the related cDNA clone;
(b) a polypeptide fragment of SEQ ID NO:Y or of the sequence encoded by the cDNA included in the related cDNA clone, having biological activity;
(c) a polypeptide domain of SEQ ID NO:Y or of the sequence encoded by the cDNA included in the related cDNA clone;
(d) a polypeptide epitope of SEQ ID NO:Y or of the sequence encoded by the cDNA included in the related cDNA clone;
(e) a full length protein of SEQ ID NO:Y or of the sequence encoded by the cDNA included in the related cDNA clone;
(f) a variant of SEQ ID NO:Y;
(g) an allelic variant of SEQ ID NO:Y; or
(h) a species homologue of the SEQ ID NO:Y.

12. The isolated polypeptide of claim 11, wherein the full length protein comprises sequential amino acid deletions from either the C-terminus or the N-terminus.

13. An isolated antibody that binds specifically to the isolated polypeptide of claim 11.

14. A recombinant host cell that expresses the isolated polypeptide of claim 11.

15. A method of making an isolated polypeptide comprising:
(a) culturing the recombinant host cell of claim 14 under conditions such that said polypeptide is expressed; and
(b) recovering said polypeptide.

16. The polypeptide produced by claim 15.

17. A method for preventing, treating, or ameliorating a medical condition, comprising administering to a mammalian subject a therapeutically effective amount of the polypeptide of claim 11 or the polynucleotide of claim 1.

18. A method of diagnosing a pathological condition or a susceptibility to a pathological condition in a subject comprising:
(a) determining the presence or absence of a mutation in the polynucleotide of claim 1; and
(b) diagnosing a pathological condition or a susceptibility to a pathological condition based on the presence or absence of said mutation.

19. A method of diagnosing a pathological condition or a susceptibility to a pathological condition in a subject comprising:
(a) determining the presence or amount of expression of the polypeptide of claim 11 in a biological sample; and
(b) diagnosing a pathological condition or a susceptibility to a pathological condition based on the presence or amount of expression of the polypeptide.

20. A method for identifying a binding partner to the polypeptide of claim 11 comprising:
(a) contacting the polypeptide of claim 11 with a binding partner; and
(b) determining whether the binding partner effects an activity of the polypeptide.

21. The gene corresponding to the cDNA sequence of SEQ ID NO:Y.

22. A method of identifying an activity in a biological assay, wherein the method comprises:
(a) expressing SEQ ID NO:X in a cell;
(b) isolating the supernatant;
(c) detecting an activity in a biological assay; and
(d) identifying the protein in the supernatant having the activity.

23. The product produced by the met.
